(19) United States
(12) Patent Application Publication
(10) Pub. No.: US 2017/0000815 A1
(43) Pub. Date: Jan. 5, 2017

(54) LIPID FORMULATED DSRNA TARGETING THE PCSK9 GENE

(71) Applicant: Alnylam Pharmaceuticals, Inc., Cambridge, MA (US)

(72) Inventors: Kevin Fitzgerald, Brookline, MA (US); Gregory Hinkle, Plymouth, MA (US); Akin Akinc, Needham, MA (US); Stuart Milstein, Cambridge, MA (US)

(21) Appl. No.: 15/060,492

(22) Filed: Mar. 3, 2016

Related U.S. Application Data
(63) Continuation of application No. 14/058,052, filed on Oct. 18, 2013, now abandoned.
Application No. 14/058,052 is a continuation of application No. 13/568,898, filed on Aug. 7, 2012, now Pat. No. 8,598,139.
Application No. 13/568,898 is a continuation of application No. 12/816,207, filed on Jun. 15, 2010, now Pat. No. 8,273,869.
(60) Provisional application No. 61/187,169, filed on Jun. 15, 2009.
(60) Provisional application No. 61/218,350, filed on Jun. 18, 2009.
(60) Provisional application No. 61/244,790, filed on Sep. 22, 2009.
(60) Provisional application No. 61/285,598, filed on Dec. 11, 2009.
(60) Provisional application No. 61/293,474, filed on Jan. 8, 2010.
(60) Provisional application No. 61/313,578, filed on Mar. 12, 2010.

(51) Int. Cl. A61K 31/713; A61K 47/48; A61K 38/17; C12N 15/113

(52) U.S. Cl. CPC A61K 31/713; C12N 15/1137; A61K 47/48815; A61K 47/48061; A61K 47/481; A61K 38/1709; C12N 2310/3515; C12N 2310/321; C12N 2310/322; C12N 2310/315

(57) ABSTRACT

This invention relates to composition and methods using lipid formulated siRNA targeted to a PCSK9 gene.

### CROSS REFERENCE TO RELATED APPLICATIONS

[0001] This application is a continuation of pending U.S. patent application Ser. No. 14/058,052 filed Oct. 18, 2013, which is a continuation of U.S. patent application Ser. No. 13/568,898, filed Aug. 7, 2012, now U.S. Pat. No. 8,598,139, issued Dec. 3, 2013, which is a continuation of U.S. patent application Ser. No. 12/816,207, filed Jun. 15, 2010, now U.S. Pat. No. 8,273,869, issued Sep. 25, 2012, which claims the benefit of U.S. Provisional Application Ser. No. 61/187,169, filed Jun. 15, 2009; and U.S. Provisional Application Ser. No. 61/218,350, filed Jun. 18, 2009; and U.S. Provisional Application Ser. No. 61/244,790, filed Sep. 22, 2009; and U.S. Provisional Application Ser. No. 61/285,598, filed Dec. 11, 2009; and U.S. Provisional Application Ser. No. 61/293,474, filed Jan. 8, 2010; and U.S. Provisional Application Ser. No. 61/313,578, filed Mar. 12, 2010, all of which are incorporated herein by reference, in their entirety, for all purposes.

### FIELD OF THE INVENTION

[0002] This invention relates to compositions comprising lipid formulated dsRNA targeting a PCSK9 gene and methods for treating diseases caused by PCSK9 gene expression.

### REFERENCE TO A SEQUENCE LISTING

[0003] This application includes a Sequence Listing submitted electronically as a text file named 33334_US_sequencelisting.txt, created on Feb. 29, 2016, with a size of 565,248 bytes, with 1730 sequences. The sequence listing is incorporated by reference.

### BACKGROUND OF THE INVENTION

[0004] Proprotein convertase subtilisin kexin 9 (PCSK9) is a member of the subtilisin serine protease family. The other eight mammalian subtilisin proteases, PCSK1-PCSK8 (also called PC1/3, PC2, furin, PC4, PC5/6, PACE4, PC7, and S1P/SKI-1) are proprotein convertases that process a wide variety of proteins in the secretory pathway and play roles in diverse biological processes (Bergeron, F. (2000) J. Mol. Endocrinol. 24, 1-22, Gensberg, K., (1998) Semin. Cell Dev. Biol. 9, 11-17, Seidah, N. G. (1999) Brain Res. 848, 45-62, Taylor, N. A., (2003) FASEB J. 17, 1215-1227, and Zhou, A., (1999) J. Biol. Chem. 274, 20745-20748). PCSK9 has been proposed to play a role in cholesterol metabolism. PCSK9 mRNA expression is down-regulated by dietary cholesterol feeding in mice (Maxwell, K. N., (2003) J. Lipid Res. 44, 2109-2119), up-regulated by statins in HepG2 cells (Dubuc, G., (2004) Arterioscler. Thromb. Vasc. Biol. 24, 1454-1459), and up-regulated in sterol regulatory element binding protein (SREBP) transgenic mice (Horton, J. D., (2003) Proc. Natl. Acad. Sci. USA 100, 12027-12032), similar to the cholesterol biosynthetic enzymes and the low-density lipoprotein receptor (LDLR). Furthermore, PCSK9 missense mutations have been found to be associated with a form of autosomal dominant hypercholesterolemia (Hchola3) (Abifadel, M., et al. (2003) Nat. Genet. 34, 154-156, Timms, K. M., (2004) Hum. Genet. 114, 349-353, Leren, T. P. (2004) Clin. Genet. 65, 419-422). PCSK9 may also play a role in determining LDL cholesterol levels in the general population, because single-nucleotide polymorphisms (SNPs) have been associated with cholesterol levels in a Japanese population (Shioji, K., (2004) J. Hum. Genet. 49, 109-114).

[0005] Autosomal dominant hypercholesterolemias (ADHs) are monogenic diseases in which patients exhibit elevated total and LDL cholesterol levels, tendon xanthomas, and premature atherosclerosis (Rader, D. J., (2003) 1 Clin. Invest. 111, 1795-1803). The pathogenesis of ADHs and a recessive form, autosomal recessive hypercholesterolemia (ARH) (Cohen, J. C., (2003) Curr. Opin. Lipidol. 14, 121-127), is due to defects in LDL uptake by the liver. ADH may be caused by LDLR mutations, which prevent LDL uptake, or by mutations in the protein on LDL, apolipoprotein B, which binds to the LDLR. ARH is caused by mutations in the ARH protein that are necessary for endocytosis of the LDLR-LDL complex via its interaction with clathrin. Therefore, if PCSK9 mutations are causative in Hchola3 families, it seems likely that PCSK9 plays a role in receptor-mediated LDL uptake.

[0006] Overexpression studies point to a role for PCSK9 in controlling LDLR levels and, hence, LDL uptake by the liver (Maxwell, K. N. (2004) Proc. Natl. Acad. Sci. USA 101, 7100-7105, Benjannet, S., et al. (2004) J. Biol. Chem. 279, 48865-48875, Park, S. W., (2004) J. Biol. Chem. 279, 50630-50638). Adenoviral-mediated overexpression of mouse or human PCSK9 for 3 or 4 days in mice results in elevated total and LDL cholesterol levels; this effect is not seen in LDLR knockout animals (Maxwell, K. N. (2004) Proc. Natl. Acad. Sci. USA 101, 7100-7105, Benjannet, S., et al. (2004) J. Biol. Chem. 279, 48865-48875, Park, S. W., (2004) J. Biol. Chem. 279, 50630-50638). In addition, PCSK9 overexpression results in a severe reduction in hepatic LDLR protein, without affecting LDLR mRNA levels, SREBP protein levels, or SREBP protein nuclear to cytoplasmic ratio.

[0007] Loss of function mutations in PCSK9 have been designed in mouse models (Rashid et al., (2005) PNAS, 102, 5374-5379), and identified in human individuals (Cohen et al. (2005) Nature Genetics 37:161-165). In both cases loss of PCSK9 function lead to lowering of total and LDLc cholesterol. In a retrospective outcome study over 15 years, loss of one copy of PCSK9 was shown to shift LDLc levels lower and to lead to an increased risk-benefit protection from developing cardiovascular heart disease (Cohen et al., (2006)N Engl. J. Med., 354:1264-1272).

[0008] Recently, double-stranded RNA molecules (dsRNA) have been shown to block gene expression in a highly conserved regulatory mechanism known as RNA interference (RNAi). WO 99/32619 (Fire et al.) discloses the use of a dsRNA of at least 25 nucleotides in length to inhibit the expression of genes in C. elegans. dsRNA has also been shown to degrade target RNA in other organisms, including plants (see, e.g., WO 99/53050, Waterhouse et al.; and WO 99/61631, Heifetz et al.), Drosophila (see, e.g., Yang, D., et al., Curr. Biol. (2000) 10:1191-1200), and mammals (see WO 00/44895, Limmer; and DE 101 00 586.5, Kreutzer et al.). This natural mechanism has now become the focus for the development of a new class of pharmaceutical agents for treating disorders that are caused by the aberrant or unwanted regulation of a gene.

[0009] A description of siRNA targeting PCSK9 can be found in U.S. Pat. No. 7,605,251 and WO 2007/134161. Additional disclosure can be found in U.S. Patent Publication No. 2010/0010066 and WO 2009/134487

### SUMMARY OF THE INVENTION

[0010] As described in more detail below, disclosed herein are compositions comprising lipid formulated siRNA targeting PCSK9, e.g., MC3 formulated siRNA targeting PCSK9. Also disclosed are methods of using the compositions for inhibition of PCSK9 expression and for treatment of pathologies related to PCSK9 expression, e.g., hyperlipidemia

[0011] Accordingly, one aspect of the invention is a compositing comprising a nucleic acid lipid particle comprising a double-stranded ribonucleic acid (dsRNA) for inhibiting the expression of a human PCSK9 gene in a cell, wherein the nucleic acid lipid particle comprises a lipid formulation comprising 45-65 mol % of a cationic lipid, 5 mol % to about 10 mol %, of a non-cationic lipid, 25-40 mol % of a sterol, and 0.5-5 mol % of a PEG or PEG-modified lipid, the dsRNA consists of a sense strand and an antisense strand, and the sense strand comprises a first sequence and the antisense strand comprises a second sequence complementary to at least 15 contiguous nucleotides of SEQ ID NO:1523 (5′-UUCUAGACCUGUUUUGCUU-3′), wherein the first sequence is complementary to the second sequence and wherein the dsRNA is between 15 and 30 base pairs in length.

[0012] As described herein the composition includes a cationic lipid. In one embodiment, the cationic lipid comprises MC3 (((6Z,9Z,28Z,31Z)-heptatriaconta-6,9,28,31-tetraen-19-yl 4-(dimethylamino)butanoate. For example, the lipid formulation can be selected from the following:

| LNP11 | MC3/DSPC/Cholesterol/PEG-DMG |
|---|---|
| | 50/10/38.5/1.5 |
| LNP14 | MC3/DSPC/Cholesterol/PEG-DMG |
| | 40/15/40/5 |
| LNP15 | MC3/DSPC/Cholesterol/PEG-DSG/GalNAc-PEG-DSG |
| | 50/10/35/4.5/0.5 |
| LNP16 | MC3/DSPC/Cholesterol/PEG-DMG |
| | 50/10/38.5/1.5 |
| LNP17 | MC3/DSPC/Cholesterol/PEG-DSG |
| | 50/10/38.5/1.5 |
| LNP18 | MC3/DSPC/Cholesterol/PEG-DMG |
| | 50/10/38.5/1.5 |
| LNP19 | MC3/DSPC/Cholesterol/PEG-DMG |
| | 50/10/35/5 |
| LNP20 | MC3/DSPC/Cholesterol/PEG-DPG |
| | 50/10/38.5/1.5 |

[0013] In other embodiments, the cationic lipid comprises formula A wherein formula A is

[chemical structure]

[0014] where R1 and R2 are independently alkyl, alkenyl or alkynyl, each can be optionally substituted, and R3 and R4 are independently lower alkyl or R3 and R4 can be taken together to form an optionally substituted heterocyclic ring. In some embodiments the cationic lipid comprises formula A and is XTC (2,2-Dilinoleyl-4-dimethylaminoethyl-[1,3]-dioxolane). The lipid formulation can include the cationic lipid XTC, the non-cationic lipid DSPC, the sterol cholesterol and the PEG lipid PEG-DMG. In other embodiments the cationic lipid comprises XTC and the formulation is selected from the group consisting of:

| LNP05 | XTC/DSPC/Cholesterol/PEG-DMG |
|---|---|
| | 57.5/7.5/31.5/3.5 |
| LNP06 | XTC/DSPC/Cholesterol/PEG-DMG |
| | 57.5/7.5/31.5/3.5 |
| LNP07 | XTC/DSPC/Cholesterol/PEG-DMG |
| | 60/7.5/31/1.5, |
| LNP08 | XTC/DSPC/Cholesterol/PEG-DMG |
| | 60/7.5/31/1.5 |
| LNP09 | XTC/DSPC/Cholesterol/PEG-DMG |
| | 50/10/38.5/1.5 |
| LNP13 | XTC/DSPC/Cholesterol/PEG-DMG |
| | 50/10/38.5/1.5 |
| LNP22 | XTC/DSPC/Cholesterol/PEG-DSG |
| | 50/10/38.5/1.5 |

[0015] In still further embodiments, the cationic lipid comprises ALNY-100 ((3aR,5s,6aS)—N,N-dimethyl-2,2-di((9Z,12Z)-octadeca-9,12-dienyl)tetrahydro-3aH-cyclopenta[d][1,3]dioxol-5-amine)). For example, the cationic lipid comprises ALNY-100 and the formulation consists of ALNY-100/DSPC/Cholesterol/PEG-DMG in a ratio of 50/10/38.5/1.5

[0016] The composition includes a dsRNA targeting PCSK9. In some embodiments, the sense strand comprises SEQ ID NO:1227 and the antisense strand comprises SEQ ID NO:1228. In other embodiments, the sense strand consists of SEQ ID NO:1227 and the antisense strand consists of SEQ ID NO:1228. One or both strands can be modified, e.g., each strand is modified as follows to include a 2′-O-methyl ribonucleotide as indicated by a lower case letter “c” or “u” and a phosphorothioate as indicated by a lower case letter “s”: the dsRNA consists of a sense strand consisting of

SEQ ID NO: 1229
(5′-uucuAGAccuGuuuuGcuuTsT-3′)

[0017] and an antisense strand consisting of

SEQ ID NO: 1230
(5′-AAGcAAAAcAGGUCuAGAATsT-3′).

[0018] In other embodiments, the dsRNA comprises at least one modified nucleotide, e.g., a modified nucleotide chosen from the group of: a 2′-O-methyl modified nucleotide, a nucleotide comprising a 5′-phosphorothioate group, and a terminal nucleotide linked to a cholesteryl derivative or dodecanoic acid bisdecylamide group, and/or, e.g., the modified nucleotide is chosen from the group of: a 2′-deoxy-2′-fluoro modified nucleotide, a 2′-deoxy-modified nucleotide, a locked nucleotide, an abasic nucleotide, 2′-amino-modified nucleotide, 2′-alkyl-modified nucleotide, morpholino nucleotide, a phosphoramidate, and a non-natural base comprising nucleotide. In one embodiment, dsRNA comprises at least one 2′-O-methyl modified ribonucleotide and at least one nucleotide comprising a 5′-phosphorothioate group.

[0019] The compositions include a dsRNA between 15 and 30 base pairs in length. In one embodiment, each strand of the dsRNA is 19-23 bases in length, or, e.g., 21-23 bases in length, or, e.g. 21 bases in length.

[0020] In one aspect, the compositions include a lipoprotein, e.g., apolipoprotein E (ApoE). In some embodiments, the compositions include a lipoprotein and the dsRNA is conjugated to a lipophile, e.g., a cholesterol. The ApoE can be reconstituted with at least one amphiphilic agent, e.g., a phospholipid, e.g., a phospholipid selected from the group consisting of dimyristoyl phosphatidyl choline (DMPC), dioleoylphosphatidylethanolamine (DOPE), palmitoyloleoylphosphatidylcholine (POPC), egg phosphatidylcholine (EPC), distearoylphosphatidylcholine (DSPC), dioleoylphosphatidylcholine (DOPC), dipalmitoylphosphatidylcholine (DPPC), dioleoylphosphatidylglycerol (DOPG), dipalmitoylphosphatidylglycerol (DPPG), -phosphatidylethanolamine (POPE), dioleoyl-phosphatidylethanolamine 4-(N-maleimidomethyl)-cyclohexane-1-carboxylate (DOPE-mal), and combinations thereof. In some embodiments, the ApoE is reconstituted high density lipoprotein (rHDL).

[0021] The compositions, e.g., lipid formulated dsRNA targeting PCSK9, can be administered to a cell or subject, e.g., a primate, e.g., a human. In one aspect, administration of the compositions inhibits expression of PCSK9 by at least 40% compared to administration of a control and/or reduces PCSK9 protein levels in the mammal compared to administration of a control, and/or reduces LDLc levels in a mammal compared to administration of a control and/or reduces both PCSK9 hepatic mRNA and total serum cholesterol at a dosage of less than 0.1 mg/kg compared to administration of a control and/or reduces PCSK9 hepatic mRNA at an ED50 of about 0.2 mg/kg and reduces total serum cholesterol with an ED50 of about 0.08 mg/kg compared to administration of a control and/or reduces serum LDL particle numbers by more than 90% or reduces serum HDL particle numbers by more than 75% compared to administration of a control.

[0022] The invention also provides methods comprising administering the lipid formulated PCSK9 targeted dsRNA compositions described herein. In one embodiment, the invention includes a method for inhibiting the expression of PCSK9 in a cell comprising administering the compositions to the cell. In another embodiment, the invention includes a method for reducing LDLc levels in a mammal in need of treatment comprising administering the compositions to the mammal.

[0023] As described in more detail below, the methods can include any appropriate dosage, e.g., between 0.25 mg/kg and 4 mg/kg dsRNA, or e.g., at about 0.01, 0.1, 0.5, 1.0, 2.5, or 5.0 mg/kg dsRNA.

[0024] Also described herein are methods for inhibiting expression of a PCSK9 gene in a subject, comprising administering to the subject the lipid formulated PCSK9 targeted dsRNA compositions described herein at a first dose of about 3 mg/kg followed by administering at least one subsequent dose once a week, wherein the subsequent dose is lower than the first dose. The subject can be, e.g., a rat or a non-human primate or a human. The subsequent dose can be about 1.0 mg/kg or about 0.3 mg/kg. In some embodiments, the subsequent dose is administered once a week for four weeks. In some embodiments, administration of the first dose decreases total cholesterol levels by about 15-60%.

[0025] The details of one or more embodiments of the invention are set forth in the accompanying drawings and the description below. Other features, objects, and advantages of the invention will be apparent from the description and drawings, and from the claims.

### BRIEF DESCRIPTION OF THE DRAWINGS

[0026] The prefixes “AD-” “DP-” and “AL-DP-” are used interchangeably e.g., AL-DP-9327 and AD-9237.

[0027] FIG. 1 shows the structure of the ND-98 lipid.

[0028] FIG. 2 shows the results of the in vivo screen of 16 mouse specific (AL-DP-9327 through AL-DP-9342) PCSK9 siRNAs directed against different ORF regions of PCSK9 mRNA (having the first nucleotide corresponding to the ORF position indicated on the graph) in C57/BL6 mice (5 animals/group). The ratio of PCSK9 mRNA to GAPDH mRNA in liver lysates was averaged over each treatment group and compared to a control group treated with PBS or a control group treated with an unrelated siRNA (blood coagulation factor VII).

[0029] FIG. 3 shows the results of the in vivo screen of 16 human/mouse/rat cross-reactive (AL-DP-9311 through AL-DP-9326) PCSK9 siRNAs directed against different ORF regions of PCSK9 mRNA (having the first nucleotide corresponding to the ORF position indicated on the graph) in C57/BL6 mice (5 animals/group). The ratio of PCSK9 mRNA to GAPDH mRNA in liver lysates was averaged over each treatment group and compared to a control group treated with PBS or a control group treated with an unrelated siRNA (blood coagulation factor VII).

[0030] FIG. 4 shows the results of the in vivo screen of 16 mouse specific (AL-DP-9327 through AL-DP-9342) PCSK9 siRNAs in C57/BL6 mice (5 animals/group). Total serum cholesterol levels were averaged over each treatment group and compared to a control group treated with PBS or a control group treated with an unrelated siRNA (blood coagulation factor VII).

[0031] FIG. 5 shows the results of the in vivo screen of 16 human/mouse/rat cross-reactive (AL-DP-9311 through AL-DP-9326) PCSK9 siRNAs in C57/BL6 mice (5 animals/group). Total serum cholesterol levels were averaged over each treatment group and compared to a control group treated with PBS or a control group treated with an unrelated siRNA (blood coagulation factor VII).

[0032] FIG. 6A and FIG. 6B compare in vitro and in vivo results, respectively, for silencing PCSK9.

[0033] FIG. 7A and FIG. 7B are examples of in vitro results for silencing PCSK9 using monkey primary hepatocytes.

[0034] FIG. 7C shows results for silencing of PCSK9 in monkey primary hepatocytes using AL-DP-9680 and chemically modified version of AL-DP-9680.

[0035] FIG. 8 shows in vivo activity of LNP-01 formulated siRNAs to PCSK-9.

[0036] FIG. 9A and FIG. 9B show in vivo activity of LNP-01 Formulated chemically modified 9314 and derivatives with chemical modifications such as AD-10792, AD-12382, AD-12384, AD-12341 at different times post a single dose in mice.

[0037] FIG. 10A shows the effect of PCSK9 siRNAs on PCSK9 transcript levels and total serum cholesterol levels in rats after a single dose of formulated AD-10792. FIG. 10B shows the effect of PCSK9 siRNAs on serum total cholesterol levels in the experiment as FIG. 10A. A single dose of formulated AD-10792 results in an ˜60% lowering of total cholesterol in the rats that returns to baseline by ˜3-4 weeks. FIG. 10C shows the effect of PCSK9 siRNAs on hepatic cholesterol and triglyceride levels in the same experiment as FIG. 10A.

[0038] FIG. 11 is a Western blot showing that liver LDL receptor levels were upregulated following administration of PCSK9 siRNAs in rat.

[0039] FIG. 12A, FIG. 12B, FIG. 12C, and FIG. 12D show the effects of PCSK9 siRNAs on LDLc and ApoB protein levels, total cholesterol/HDLc ratios, and PCSK9 protein levels, respectively, in nonhuman primates following a single dose of formulated AD-10792 or AD-9680.

[0040] FIG. 13A is a graph showing that unmodified siRNA-AD-A1A (AD-9314), but not 2′OMe modified siRNA-AD-1A2 (AD-10792), induced IFN-alpha in human primary blood monocytes. FIG. 13B is a graph showing that unmodified siRNA-AD-A1A (AD-9314), but not 2′OMe modified siRNA-AD-1A2 (AD-10792), also induced TNF-alpha in human primary blood monocytes.

[0041] FIG. 14A is a graph showing that the PCSK9 siRNA siRNA-AD-1A2 (a.k.a. LNP-PCS-A2 or a.k.a. “formulated AD-10792”) decreased PCSK9 mRNA levels in mice liver in a dose-dependent manner. FIG. 14B is a graph showing that single administration of 5 mg/kg siRNA-AD-1A2 decreased serum total cholesterol levels in mice within 48 hours.

[0042] FIG. 15A is a graph showing that PCSK9 siRNAs targeting human and monkey PCSK9 (LNP-PCS-C2) (a.k.a. “formulated AD-9736”), and PCSK9 siRNAs targeting mouse PCSK9 (LNP-PCS-A2) (a.k.a. “formulated AD-10792”), reduced liver PCSK9 levels in transgenic mice expressing human PCSK9. FIG. 15B is a graph showing that LNP-PCS-C2 and LNP-PCS-A2 reduced plasma PCSK9 levels in the same transgenic mice.

[0043] FIG. 16 shows the structure of an siRNA conjugated to Chol-p-(GalNAc)3 via phosphate linkage at the 3′ end.

[0044] FIG. 17 shows the structure of an siRNA conjugated to LCO(GalNAc)3 (a (GalNAc)3-3′-Lithocholic-oleoyl siRNA Conjugate).

[0045] FIG. 18 is a graph showing the results of conjugated siRNAs on PCSK9 transcript levels and total serum cholesterol in mice.

[0046] FIG. 19 is a graph showing the results of lipid formulated siRNAs on PCSK9 transcript levels and total serum cholesterol in rats.

[0047] FIG. 20 is a graph showing the results of siRNA transfection on PCSK9 transcript levels in HeLa cells using AD-9680 and variations of AD-9680 as described in Table 6.

[0048] FIG. 21 is a graph showing the results of siRNA transfection on PCSK9 transcript levels in HeLa cells using AD-14676 and variations of AD-14676 as described in Table 6.

[0049] FIG. 22 is a graph with the results of PCSK9 targeted siRNA transfection of Hep3B cells and the effects on PCSK9 and off-target gene levels.

[0050] FIG. 23 shows the results of treatment in rats with a maintenance dose of PCSK9 targeted siRNA.

[0051] FIG. 24 is a dose response curve of treatment of HeLa cells with modified siRNAs.

[0052] FIG. 25 is a graph of average IC50 of siRNA vs. target position in human PCSK9 transcript. The large blue dot indicates the IC50 and location of AD-9680.

[0053] FIG. 26 is a graph with the results of administration of rEHDL formulated cholesterol conjugated siRNA.

[0054] FIG. 27A is a graph with results of administration of second generation LNP formulated PCSK9 targeted siRNA (AD-9680 in LNP11) to non-human primates, demonstrating a reduction in both PCSK9 protein and LDLc levels. LDLc: low density lipoprotein cholesterol; mpk: mg per kg.

[0055] FIG. 27B is a bar graph showing dose dependent PCSK mRNA silencing in non-human primates after treatment with LNP formulated siRNA targeting PCSK9.

[0056] FIG. 27C is a graph with the results of administration of second generation LNP formulated PCSK9 targeted siRNA (AD-9680) to non-human primates, demonstrating a no change in HDLc levels.

[0057] FIG. 28 illustrates the chemical structures of the cationic lipids MC3 and ALNY-100.

[0058] FIG. 29 is a graph of effects on PCSK9 mRNA and serum cholesterol levels in rats after administration of LNP-09 formulated AD-10792, an siRNA targeting rodent PCSK9.

[0059] FIG. 30 are graphs of the effects on PCSK9 mRNA and LDL/HDL particle numbers in CETP/ApoB tg mice after administration of LNP-09 formulated AD-10792, an siRNA targeting rodent PCSK9.

### DETAILED DESCRIPTION OF THE INVENTION

[0060] The invention provides a solution to the problem of treating diseases that can be modulated by the down regulation of the PCSK9 gene, such as hyperlipidemia, by using double-stranded ribonucleic acid (dsRNA) to silence the PCSK9 gene.

[0061] The invention provides compositions and methods for inhibiting the expression of the PCSK9 gene in a subject using a dsRNA. The invention also provides compositions and methods for treating pathological conditions and diseases, such as hyperlipidemia, that can be modulated by down regulating the expression of the PCSK9 gene. dsRNA directs the sequence-specific degradation of mRNA through a process known as RNA interference (RNAi).

[0062] The dsRNA useful for the compositions and methods of an invention include an RNA strand (the antisense strand) having a region that is less than 30 nucleotides in length, generally 19-24 nucleotides in length, and is substantially complementary to at least part of an mRNA transcript of the PCSK9 gene. The use of these dsRNAs enables the targeted degradation of an mRNA that is involved in the regulation of the LDL Receptor and circulating cholesterol levels. Using cell-based and animal assays, the present inventors have demonstrated that very low dosages of these dsRNAs can specifically and efficiently mediate RNAi, resulting in significant inhibition of expression of the PCSK9 gene. Thus, methods and compositions including these dsRNAs are useful for treating pathological processes that can be mediated by down regulating PCSK9, such as in the treatment of hyperlipidemia.

[0063] The following detailed description discloses how to make and use the dsRNA and compositions containing dsRNA to inhibit the expression of the target PCSK9 gene, as well as compositions and methods for treating diseases that can be modulated by down regulating the expression of PCSK9, such as hyperlipidemia. The pharmaceutical compositions of the invention include a dsRNA having an antisense strand having a region of complementarity that is less than 30 nucleotides in length, generally 19-24 nucleotides in length, and that is substantially complementary to at least part of an RNA transcript of the PCSK9 gene, together with a pharmaceutically acceptable carrier.

[0064] Accordingly, certain aspects of the invention provide pharmaceutical compositions including the dsRNA that targets PCSK9 together with a pharmaceutically acceptable carrier, methods of using the compositions to inhibit expression of the PCSK9 gene, and methods of using the pharmaceutical compositions to treat diseases by down regulating the expression of PCSK9.

### DEFINITIONS

[0065] For convenience, the meaning of certain terms and phrases used in the specification, examples, and appended claims, are provided below. If there is an apparent discrepancy between the usage of a term in other parts of this specification and its definition provided in this section, the definition in this section shall prevail.

[0066] “G,” “C,” “A” and “U” each generally stand for a nucleotide that contains guanine, cytosine, adenine, and uracil as a base, respectively. “T” and “dT” are used interchangeably herein and refer to a deoxyribonucleotide wherein the nucleobase is thymine, e.g., deoxyribothymine. However, it will be understood that the term “ribonucleotide” or “nucleotide” or “deoxyribonucleotide” can also refer to a modified nucleotide, as further detailed below, or a surrogate replacement moiety. The skilled person is well aware that guanine, cytosine, adenine, and uracil may be replaced by other moieties without substantially altering the base pairing properties of an oligonucleotide comprising a nucleotide bearing such replacement moiety. For example, without limitation, a nucleotide comprising inosine as its base may base pair with nucleotides containing adenine, cytosine, or uracil. Hence, nucleotides containing uracil, guanine, or adenine may be replaced in the nucleotide sequences of the invention by a nucleotide containing, for example, inosine. Sequences comprising such replacement moieties are embodiments of the invention.

[0067] As used herein, “PCSK9” refers to the proprotein convertase subtilisin kexin 9 gene or protein (also known as FH3, HCHOLA3, NARC-1, NARC1). Examples of mRNA sequences to PCSK9 include but are not limited to the following: human: NM_174936; mouse: NM_153565, and rat: NM_199253. Additional examples of PCSK9 mRNA sequences are readily available using, e.g., GenBank.

[0068] As used herein, “target sequence” refers to a contiguous portion of the nucleotide sequence of an mRNA molecule formed during the transcription of the PCSK9 gene, including mRNA that is a product of RNA processing of a primary transcription product.

[0069] As used herein, the term “strand comprising a sequence” refers to an oligonucleotide comprising a chain of nucleotides that is described by the sequence referred to using the standard nucleotide nomenclature.

[0070] As used herein, and unless otherwise indicated, the term “complementary,” when used to describe a first nucleotide sequence in relation to a second nucleotide sequence, refers to the ability of an oligonucleotide or polynucleotide comprising the first nucleotide sequence to hybridize and form a duplex structure under certain conditions with an oligonucleotide or polynucleotide comprising the second nucleotide sequence, as will be understood by the skilled person. Such conditions can, for example, be stringent conditions, where stringent conditions may include: 400 mM NaCl, 40 mM PIPES pH 6.4, 1 mM EDTA, 50° C. or 70° C. for 12-16 hours followed by washing. Other conditions, such as physiologically relevant conditions as may be encountered inside an organism, can apply. The skilled person will be able to determine the set of conditions most appropriate for a test of complementarity of two sequences in accordance with the ultimate application of the hybridized nucleotides.

[0071] This includes base-pairing of the oligonucleotide or polynucleotide having the first nucleotide sequence to the oligonucleotide or polynucleotide having the second nucleotide sequence over the entire length of the first and second nucleotide sequences. Such sequences can be referred to as “fully complementary” with respect to each other. However, where a first sequence is referred to as “substantially complementary” with respect to a second sequence herein, the two sequences can be fully complementary, or they may form one or more, but generally not more than 4, 3 or 2 mismatched base pairs upon hybridization, while retaining the ability to hybridize under the conditions most relevant to their ultimate application. However, where two oligonucleotides are designed to form, upon hybridization, one or more single stranded overhangs, such overhangs shall not be regarded as mismatches with regard to the determination of complementarity. For example, a dsRNA having one oligonucleotide 21 nucleotides in length and another oligonucleotide 23 nucleotides in length, wherein the longer oligonucleotide has a sequence of 21 nucleotides that is fully complementary to the shorter oligonucleotide, may yet be referred to as “fully complementary.”

[0072] “Complementary” sequences, as used herein, may also include, or be formed entirely from, non-Watson-Crick base pairs and/or base pairs formed from non-natural and modified nucleotides, in as far as the above requirements with respect to their ability to hybridize are fulfilled. Such non-Watson-Crick base pairs includes, but not limited to, G:U Wobble or Hoogstein base pairing.

[0073] The terms “complementary”, “fully complementary” and “substantially complementary” herein may be used with respect to the base matching between the sense strand and the antisense strand of a dsRNA, or between the antisense strand of a dsRNA and a target sequence, as will be understood from the context of their use.

[0074] As used herein, a polynucleotide which is “substantially complementary to at least part of” a messenger RNA (mRNA) refers to a polynucleotide that is substantially complementary to a contiguous portion of the mRNA of interest (e.g., encoding PCSK9) including a 5″ UTR, an open reading frame (ORF), or a 3′ UTR. For example, a polynucleotide is complementary to at least a part of a PCSK9 mRNA if the sequence is substantially complementary to a non-interrupted portion of an mRNA encoding PCSK9.

[0075] The term “double-stranded RNA” or “dsRNA”, as used herein, refers a duplex structure comprising two anti-parallel and substantially complementary, as defined above, nucleic acid strands. In general, the majority of nucleotides of each strand are ribonucleotides, but as described in detail herein, each or both strands can also include at least one non-ribonucleotide, e.g., a deoxyribonucleotide and/or a modified nucleotide. In addition, as used in this specification, “dsRNA” may include chemical modifications to ribonucleotides, including substantial modifications at multiple nucleotides and including all types of modifications disclosed herein or known in the art. Any such modifications, as used in an siRNA type molecule, are encompassed by “dsRNA” for the purposes of this specification and claims.

[0076] The two strands forming the duplex structure may be different portions of one larger RNA molecule, or they may be separate RNA molecules. Where separate RNA molecules, such dsRNA are often referred to in the literature as siRNA (“short interfering RNA”). Where the two strands are part of one larger molecule, and therefore are connected by an uninterrupted chain of nucleotides between the 3′-end of one strand and the 5′end of the respective other strand forming the duplex structure, the connecting RNA chain is referred to as a “hairpin loop”, “short hairpin RNA” or “shRNA”. Where the two strands are connected covalently by means other than an uninterrupted chain of nucleotides between the 3′-end of one strand and the 5′ end of the respective other strand forming the duplex structure, the connecting structure is referred to as a “linker”. The RNA strands may have the same or a different number of nucleotides. The maximum number of base pairs is the number of nucleotides in the shortest strand of the dsRNA minus any overhangs that are present in the duplex. In addition to the duplex structure, a dsRNA may comprise one or more nucleotide overhangs. In general, the majority of nucleotides of each strand are ribonucleotides, but as described in detail herein, each or both strands can also include at least one non-ribonucleotide, e.g., a deoxyribonucleotide and/or a modified nucleotide. In addition, as used in this specification, “dsRNA” may include chemical modifications to ribonucleotides, including substantial modifications at multiple nucleotides and including all types of modifications disclosed herein or known in the art. Any such modifications, as used in an siRNA type molecule, are encompassed by “dsRNA” for the purposes of this specification and claims.

[0077] As used herein, a “nucleotide overhang” refers to the unpaired nucleotide or nucleotides that protrude from the duplex structure of a dsRNA when a 3′-end of one strand of the dsRNA extends beyond the 5′-end of the other strand, or vice versa. “Blunt” or “blunt end” means that there are no unpaired nucleotides at that end of the dsRNA, i.e., no nucleotide overhang. A “blunt ended” dsRNA is a dsRNA that is double-stranded over its entire length, i.e., no nucleotide overhang at either end of the molecule. For clarity, chemical caps or non-nucleotide chemical moieties conjugated to the 3′ end or 5′ end of an siRNA are not considered in determining whether an siRNA has an overhang or is blunt ended.

[0078] The term “antisense strand” refers to the strand of a dsRNA which includes a region that is substantially complementary to a target sequence. As used herein, the term “region of complementarity” refers to the region on the antisense strand that is substantially complementary to a sequence, for example a target sequence, as defined herein. Where the region of complementarity is not fully complementary to the target sequence, the mismatches may be in the internal or terminal regions of the molecule. Generally the most tolerated mismatches are in the terminal regions, e.g., within 6, 5, 4, 3, or 2 nucleotides of the 5′ and/or 3′ terminus.

[0079] The term “sense strand,” as used herein, refers to the strand of a dsRNA that includes a region that is substantially complementary to a region of the antisense strand.

[0080] “Introducing into a cell”, when referring to a dsRNA, means facilitating uptake or absorption into the cell, as is understood by those skilled in the art. Absorption or uptake of dsRNA can occur through unaided diffusive or active cellular processes, or by auxiliary agents or devices. The meaning of this term is not limited to cells in vitro; a dsRNA may also be “introduced into a cell”, wherein the cell is part of a living organism. In such instance, introduction into the cell will include the delivery to the organism. For example, for in vivo delivery, dsRNA can be injected into a tissue site or administered systemically. In vitro introduction into a cell includes methods known in the art such as electroporation and lipofection.

[0081] The terms “silence,” “inhibit the expression of,” “down-regulate the expression of,” “suppress the expression of,” and the like, in as far as they refer to the PCSK9 gene, herein refer to the at least partial suppression of the expression of the PCSK9 gene, as manifested by a reduction of the amount of PCSK9 mRNA which may be isolated from a first cell or group of cells in which the PCSK9 gene is transcribed and which has or have been treated such that the expression of the PCSK9 gene is inhibited, as compared to a second cell or group of cells substantially identical to the first cell or group of cells but which has or have not been so treated (control cells). The degree of inhibition is usually expressed in terms of

$$\frac{( mRNA in control cells ) - ( mRNA in treated cells )}{( mRNA in control cells )} \cdot 100 \%$$

[0082] Alternatively, the degree of inhibition may be given in terms of a reduction of a parameter that is functionally linked to PCSK9 gene expression, e.g. the amount of protein encoded by the PCSK9 gene which is produced by a cell, or the number of cells displaying a certain phenotype. In principle, target gene silencing can be determined in any cell expressing the target, either constitutively or by genomic engineering, and by any appropriate assay. However, when a reference is needed in order to determine whether a given dsRNA inhibits the expression of the PCSK9 gene by a certain degree and therefore is encompassed by the instant invention, the assays provided in the Examples below shall serve as such reference.

[0083] As used herein in the context of PCSK9 expression, the terms “treat”, “treatment”, and the like, refer to relief from or alleviation of pathological processes which can be mediated by down regulating the PCSK9 gene. In the context of the present invention insofar as it relates to any of the other conditions recited herein below (other than pathological processes which can be mediated by down regulating the PCSK9 gene), the terms “treat”, “treatment”, and the like mean to relieve or alleviate at least one symptom associated with such condition, or to slow or reverse the progression of such condition. For example, in the context of hyperlipidemia, treatment will involve a decrease in serum lipid levels.

[0084] As used herein, the phrases “therapeutically effective amount” and “prophylactically effective amount” refer to an amount that provides a therapeutic benefit in the treatment, prevention, or management of pathological processes that can be mediated by down regulating the PCSK9 gene or an overt symptom of pathological processes which can be mediated by down regulating the PCSK9 gene. The specific amount that is therapeutically effective can be readily determined by an ordinary medical practitioner, and may vary depending on factors known in the art, such as, e.g., the type of pathological processes that can be mediated by down regulating the PCSK9 gene, the patient's history and age, the stage of pathological processes that can be mediated by down regulating PCSK9 gene expression, and the administration of other anti-pathological processes that can be mediated by down regulating PCSK9 gene expression.

[0085] As used herein, a “pharmaceutical composition” includes a pharmacologically effective amount of a dsRNA and a pharmaceutically acceptable carrier. As used herein, “pharmacologically effective amount,” “therapeutically effective amount” or simply “effective amount” refers to that amount of an RNA effective to produce the intended pharmacological, therapeutic or preventive result. For example, if a given clinical treatment is considered effective when there is at least a 25% reduction in a measurable parameter associated with a disease or disorder, a therapeutically effective amount of a drug for the treatment of that disease or disorder is the amount necessary to effect at least a 25% reduction in that parameter.

[0086] The term “pharmaceutically acceptable carrier” refers to a carrier for administration of a therapeutic agent. Such carriers include, but are not limited to, saline, buffered saline, dextrose, water, glycerol, ethanol, and combinations thereof and are described in more detail below. The term specifically excludes cell culture medium.

[0087] As used herein, a “transformed cell” is a cell into which a vector has been introduced from which a dsRNA molecule may be expressed.

[0088] Double-Stranded Ribonucleic Acid (dsRNA)

[0089] As described in more detail below, the invention provides methods and composition having double-stranded ribonucleic acid (dsRNA) molecules for inhibiting the expression of the PCSK9 gene in a cell or mammal, wherein the dsRNA includes an antisense strand having a region of complementarity that is complementary to at least a part of an mRNA formed in the expression of the PCSK9 gene, and wherein the region of complementarity is less than 30 nucleotides in length, generally 19-24 nucleotides in length. In some embodiments, the dsRNA, upon contact with a cell expressing the PCSK9 gene, inhibits the expression of said PCSK9 gene, e.g., as measured such as by an assay described herein. For example, expression of a PCSK9 gene in cell culture, such as in HepB3 cells, can be assayed by measuring PCSK9 mRNA levels, such as by bDNA or TaqMan assay, or by measuring protein levels, such as by ELISA assay. The dsRNA of the invention can further include one or more single-stranded nucleotide overhangs.

[0090] The dsRNA can be synthesized by standard methods known in the art as further discussed below, e.g., by use of an automated DNA synthesizer, such as are commercially available from, for example, Biosearch, Applied Biosystems, Inc. The dsRNA includes two nucleic acid strands that are sufficiently complementary to hybridize to form a duplex structure. One strand of the dsRNA (the antisense strand) can have a region of complementarity that is substantially complementary, and generally fully complementary, to a target sequence, derived from the sequence of an mRNA formed during the expression of the PCSK9 gene. The other strand (the sense strand) includes a region that is complementary to the antisense strand, such that the two strands hybridize and form a duplex structure when combined under suitable conditions. Generally, the duplex structure is between 15 and 30, or between 25 and 30, or between 18 and 25, or between 19 and 24, or between 19 and 21, or 19, 20, or 21 base pairs in length. In one embodiment the duplex is 19 base pairs in length. In another embodiment the duplex is 21 base pairs in length. When two different siRNAs are used in combination, the duplex lengths can be identical or can differ.

[0091] Each strand of the dsRNA of invention is generally between 15 and 30, or between 18 and 25, or 18, 19, 20, 21, 22, 23, 24, or 25 nucleotides in length. In other embodiments, each is strand is 25-30 nucleotides in length. Each strand of the duplex can be the same length or of different lengths. When two different siRNAs are used in combination, the lengths of each strand of each siRNA can be identical or can differ.

[0092] The dsRNA of the invention can include one or more single-stranded overhang(s) of one or more nucleotides. In one embodiment, at least one end of the dsRNA has a single-stranded nucleotide overhang of 1 to 4, generally 1 or 2 nucleotides. In another embodiment, the antisense strand of the dsRNA has 1-10 nucleotides overhangs each at the 3′ end and the 5′ end over the sense strand. In further embodiments, the sense strand of the dsRNA has 1-10 nucleotides overhangs each at the 3′ end and the 5′ end over the antisense strand.

[0093] A dsRNAs having at least one nucleotide overhang can have unexpectedly superior inhibitory properties than the blunt-ended counterpart. In some embodiments the presence of only one nucleotide overhang strengthens the interference activity of the dsRNA, without affecting its overall stability. A dsRNA having only one overhang has proven particularly stable and effective in vivo, as well as in a variety of cells, cell culture mediums, blood, and serum. Generally, the single-stranded overhang is located at the 3′-terminal end of the antisense strand or, alternatively, at the 3′-terminal end of the sense strand. The dsRNA can also have a blunt end, generally located at the 5′-end of the antisense strand. Such dsRNAs can have improved stability and inhibitory activity, thus allowing administration at low dosages, i.e., less than 5 mg/kg body weight of the recipient per day. Generally, the antisense strand of the dsRNA has a nucleotide overhang at the 3′-end, and the 5′-end is blunt. In another embodiment, one or more of the nucleotides in the overhang is replaced with a nucleoside thiophosphate.

[0094] The dsRNA can be synthesized by standard methods known in the art as further discussed below, e.g., by use of an automated DNA synthesizer, such as are commercially available from, for example, Biosearch, Applied Biosystems, Inc. In one embodiment, the PCSK9 gene is a human PCSK9 gene. In other embodiments, the antisense strand of the dsRNA includes a first strand selected from the sense sequences of Table 1a, Table 2a, and Table 5a, and a second strand selected from the antisense sequences of Table 1a, Table 2a, and Table 5a. Alternative antisense agents that target elsewhere in the target sequence provided in Table 1a, Table 2a, and Table 5a, can readily be determined using the target sequence and the flanking PCSK9 sequence.

[0095] For example, the dsRNA AD-9680 (from Table 1a) targets the PCSK 9 gene at 3530-3548; therefore the target sequence is as follows: 5′ UUCUAGACCUGUUUUGCUU 3′ (SEQ ID NO:1523). The dsRNA AD-10792 (from Table 1a) targets the PCSK9 gene at 1091-1109; therefore the target sequence is as follows: 5′ GCCUGGAGUUUAUUCGGAA 3′ (SEQ ID NO:1524). Included in the invention are dsRNAs that have regions of complementarity to SEQ ID NO:1523 and SEQ ID NO:1524.

[0096] In further embodiments, the dsRNA includes at least one nucleotide sequence selected from the groups of sequences provided in Table 1a, Table 2a, and Table 5a. In other embodiments, the dsRNA includes at least two sequences selected from this group, where one of the at least two sequences is complementary to another of the at least two sequences, and one of the at least two sequences is substantially complementary to a sequence of an mRNA generated in the expression of the PCSK9 gene. Generally, the dsRNA includes two oligonucleotides, where one oligonucleotide is described as the sense strand in Table 1a, Table 2a, and Table 5a and the second oligonucleotide is described as the antisense strand in Table 1a, Table 2a, and Table 5a

[0097] The skilled person is well aware that dsRNAs having a duplex structure of between 20 and 23, but specifically 21, base pairs have been hailed as particularly effective in inducing RNA interference (Elbashir et al., EMBO 2001, 20:6877-6888). However, others have found that shorter or longer dsRNAs can be effective as well. In the embodiments described above, by virtue of the nature of the oligonucleotide sequences provided in Table 1a, Table 2a, and Table 5a, the dsRNAs of the invention can include at least one strand of a length of minimally 21 nt. It can be reasonably expected that shorter dsRNAs having one of the sequences of Table 1a, Table 2a, and Table 5a minus only a few nucleotides on one or both ends may be similarly effective as compared to the dsRNAs described above. Hence, dsRNAs having a partial sequence of at least 15, 16, 17, 18, 19, 20, or more contiguous nucleotides from one of the sequences of Table 1a, Table 2a, and Table 5a, and differing in their ability to inhibit the expression of the PCSK9 gene in a FACS assay as described herein below by not more than 5, 10, 15, 20, 25, or 30% inhibition from a dsRNA comprising the full sequence, are contemplated by the invention. Further dsRNAs that cleave within the target sequence provided in Table 1a, Table 2a, and Table 5a can readily be made using the PCSK9 sequence and the target sequence provided.

[0098] In addition, the RNAi agents provided in Table 1a, Table 2a, and Table 5a identify a site in the PCSK9 mRNA that is susceptible to RNAi based cleavage. As such the present invention further includes RNAi agents that target within the sequence targeted by one of the agents of the present invention. As used herein a second RNAi agent is said to target within the sequence of a first RNAi agent if the second RNAi agent cleaves the message anywhere within the mRNA that is complementary to the antisense strand of the first RNAi agent. Such a second agent will generally consist of at least 15 contiguous nucleotides from one of the sequences provided in Table 1a, Table 2a, and Table 5a coupled to additional nucleotide sequences taken from the region contiguous to the selected sequence in the PCSK9 gene. For example, the last 15 nucleotides of SEQ ID NO:1 (minus the added AA sequences) combined with the next 6 nucleotides from the target PCSK9 gene produces a single strand agent of 21 nucleotides that is based on one of the sequences provided in Table 1a, Table 2a, and Table 5a.

[0099] The dsRNA of the invention can contain one or more mismatches to the target sequence. In one embodiment, the dsRNA of the invention contains no more than 1, no more than 2, or no more than 3 mismatches. In one embodiment, the antisense strand of the dsRNA contains mismatches to the target sequence, and the area of mismatch is not located in the center of the region of complementarity. In another embodiment, the antisense strand of the dsRNA contains mismatches to the target sequence and the mismatch is restricted to 5 nucleotides from either end, for example 5, 4, 3, 2, or 1 nucleotide from either the 5′ or 3′ end of the region of complementarity. For example, for a 23 nucleotide dsRNA strand which is complementary to a region of the PCSK9 gene, the dsRNA does not contain any mismatch within the central 13 nucleotides. The methods described within the invention can be used to determine whether a dsRNA containing a mismatch to a target sequence is effective in inhibiting the expression of the PCSK9 gene. Consideration of the efficacy of dsRNAs with mismatches in inhibiting expression of the PCSK9 gene is important, especially if the particular region of complementarity in the PCSK9 gene is known to have polymorphic sequence variation within the population.

[0100] In one embodiment, at least one end of the dsRNA has a single-stranded nucleotide overhang of 1 to 4, generally 1 or 2 nucleotides. dsRNAs having at least one nucleotide overhang have unexpectedly superior inhibitory properties than their blunt-ended counterparts. Moreover, the present inventors have discovered that the presence of only one nucleotide overhang strengthens the interference activity of the dsRNA, without affecting its overall stability. dsRNA having only one overhang has proven particularly stable and effective in vivo, as well as in a variety of cells, cell culture mediums, blood, and serum. Generally, the single-stranded overhang is located at the 3′-terminal end of the antisense strand or, alternatively, at the 3′-terminal end of the sense strand. The dsRNA may also have a blunt end, generally located at the 5′-end of the antisense strand. Such dsRNAs have improved stability and inhibitory activity, thus allowing administration at low dosages, i.e., less than 5 mg/kg body weight of the recipient per day. Generally, the antisense strand of the dsRNA has a nucleotide overhang at the 3′-end, and the 5′-end is blunt. In another embodiment, one or more of the nucleotides in the overhang is replaced with a nucleoside thiophosphate.

[0101] Chemical Modifications and Conjugates

[0102] In yet another embodiment, the dsRNA is chemically modified to enhance stability. The nucleic acids of the invention may be synthesized and/or modified by methods well established in the art, such as those described in “Current protocols in nucleic acid chemistry”, Beaucage, S. L. et al. (Edrs.), John Wiley & Sons, Inc., New York, N.Y., USA, which is hereby incorporated herein by reference. Chemical modifications may include, but are not limited to 2′ modifications, modifications at other sites of the sugar or base of an oligonucleotide, introduction of non-natural bases into the oligonucleotide chain, covalent attachment to a ligand or chemical moiety, and replacement of internucleotide phosphate linkages with alternate linkages such as thiophosphates. More than one such modification may be employed.

[0103] Chemical linking of the two separate dsRNA strands may be achieved by any of a variety of well-known techniques, for example by introducing covalent, ionic or hydrogen bonds; hydrophobic interactions, van der Waals or stacking interactions; by means of metal-ion coordination, or through use of purine analogues. Generally, the chemical groups that can be used to modify the dsRNA include, without limitation, methylene blue; bifunctional groups, generally bis-(2-chloroethyl)amine; N-acetyl-N′-(p-glyoxylbenzoyl)cystamine; 4-thiouracil; and psoralen. In one embodiment, the linker is a hexa-ethylene glycol linker. In this case, the dsRNA are produced by solid phase synthesis and the hexa-ethylene glycol linker is incorporated according to standard methods (e.g., Williams, D. J., and K. B. Hall, Biochem. (1996) 35:14665-14670). In a particular embodiment, the 5′-end of the antisense strand and the 3′-end of the sense strand are chemically linked via a hexaethylene glycol linker. In another embodiment, at least one nucleotide of the dsRNA comprises a phosphorothioate or phosphorodithioate groups. The chemical bond at the ends of the dsRNA is generally formed by triple-helix bonds. Table 1a, Table 2a, and Table 5a provides examples of modified RNAi agents of the invention.

[0104] In yet another embodiment, the nucleotides at one or both of the two single strands may be modified to prevent or inhibit the degradation activities of cellular enzymes, such as, for example, without limitation, certain nucleases. Techniques for inhibiting the degradation activity of cellular enzymes against nucleic acids are known in the art including, but not limited to, 2′-amino modifications, 2′-amino sugar modifications, 2′-F sugar modifications, 2′-F modifications, 2′-alkyl sugar modifications, uncharged backbone modifications, morpholino modifications, 2′-O-methyl modifications, and phosphoramidate (see, e.g., Wagner, Nat. Med. (1995) 1:1116-8). Thus, at least one 2′-hydroxyl group of the nucleotides on a dsRNA is replaced by a chemical group, generally by a 2′-amino or a 2′-methyl group. Also, at least one nucleotide may be modified to form a locked nucleotide. Such locked nucleotide contains a methylene bridge that connects the 2′-oxygen of ribose with the 4′-carbon of ribose. Oligonucleotides containing the locked nucleotide are described in Koshkin, A. A., et al., Tetrahedron (1998), 54: 3607-3630) and Obika, S. et al., Tetrahedron Lett. (1998), 39: 5401-5404). Introduction of a locked nucleotide into an oligonucleotide improves the affinity for complementary sequences and increases the melting temperature by several degrees (Braasch, D. A. and D. R. Corey, Chem. Biol. (2001), 8:1-7).

[0105] Conjugating a ligand to a dsRNA can enhance its cellular absorption as well as targeting to a particular tissue or uptake by specific types of cells such as liver cells. In certain instances, a hydrophobic ligand is conjugated to the dsRNA to facilitate direct permeation of the cellular membrane and or uptake across the liver cells. Alternatively, the ligand conjugated to the dsRNA is a substrate for receptor-mediated endocytosis. These approaches have been used to facilitate cell permeation of antisense oligonucleotides as well as dsRNA agents. For example, cholesterol has been conjugated to various antisense oligonucleotides resulting in compounds that are substantially more active compared to their non-conjugated analogs. See M. Manoharan Antisense & Nucleic Acid Drug Development 2002, 12, 103. Other lipophilic compounds that have been conjugated to oligonucleotides include 1-pyrene butyric acid, 1,3-bis-O-(hexadecyl)glycerol, and menthol. One example of a ligand for receptor-mediated endocytosis is folic acid. Folic acid enters the cell by folate-receptor-mediated endocytosis. dsRNA compounds bearing folic acid would be efficiently transported into the cell via the folate-receptor-mediated endocytosis. Li and coworkers report that attachment of folic acid to the 3′-terminus of an oligonucleotide resulted in an 8-fold increase in cellular uptake of the oligonucleotide. Li, S.; Deshmukh, H. M.; Huang, L. Pharm. Res. 1998, 15, 1540. Other ligands that have been conjugated to oligonucleotides include polyethylene glycols, carbohydrate clusters, cross-linking agents, porphyrin conjugates, delivery peptides and lipids such as cholesterol and cholesterylamine. Examples of carbohydrate clusters include Chol-p-(GalNAc)₃ (N-acetyl galactosamine cholesterol) and LCO(GalNAc)₃ (N-acetyl galactosamine-3′-Lithocholic-oleoyl.

[0106] In certain instances, conjugation of a cationic ligand to oligonucleotides results in improved resistance to nucleases. Representative examples of cationic ligands are propylammonium and dimethylpropylammonium. Interestingly, antisense oligonucleotides were reported to retain their high binding affinity to mRNA when the cationic ligand was dispersed throughout the oligonucleotide. See M. Manoharan Antisense & Nucleic Acid Drug Development 2002, 12, 103 and references therein.

[0107] In some cases, a ligand can be multifunctional and/or a dsRNA can be conjugated to more than one ligand. For example, the dsRNA can be conjugated to one ligand for improved uptake and to a second ligand for improved release.

[0108] The ligand-conjugated dsRNA of the invention may be synthesized by the use of a dsRNA that bears a pendant reactive functionality, such as that derived from the attachment of a linking molecule onto the dsRNA. This reactive oligonucleotide may be reacted directly with commercially-available ligands, ligands that are synthesized bearing any of a variety of protecting groups, or ligands that have a linking moiety attached thereto. The methods of the invention facilitate the synthesis of ligand-conjugated dsRNA by the use of, in some embodiments, nucleoside monomers that have been appropriately conjugated with ligands and that may further be attached to a solid-support material. Such ligand-nucleoside conjugates, optionally attached to a solid-support material, are prepared according to certain embodiments of the methods described herein via reaction of a selected serum-binding ligand with a linking moiety located on the 5′ position of a nucleoside or oligonucleotide. In certain instances, a dsRNA bearing an aralkyl ligand attached to the 3′-terminus of the dsRNA is prepared by first covalently attaching a monomer building block to a controlled-pore-glass support via a long-chain aminoalkyl group. Then, nucleotides are bonded via standard solid-phase synthesis techniques to the monomer building-block bound to the solid support. The monomer building block may be a nucleoside or other organic compound that is compatible with solid-phase synthesis.

[0109] The dsRNA used in the conjugates of the invention may be conveniently and routinely made through the well-known technique of solid-phase synthesis. Equipment for such synthesis is sold by several vendors including, for example, Applied Biosystems (Foster City, Calif.). Any other means for such synthesis known in the art may additionally or alternatively be employed. It is also known to use similar techniques to prepare other oligonucleotides, such as the phosphorothioates and alkylated derivatives.

[0110] Synthesis

[0111] Teachings regarding the synthesis of particular modified oligonucleotides may be found in the following U.S. patents: U.S. Pat. Nos. 5,138,045 and 5,218,105, drawn to polyamine conjugated oligonucleotides; U.S. Pat. No. 5,212,295, drawn to monomers for the preparation of oligonucleotides having chiral phosphorus linkages; U.S. Pat. Nos. 5,378,825 and 5,541,307, drawn to oligonucleotides having modified backbones; U.S. Pat. No. 5,386,023, drawn to backbone-modified oligonucleotides and the preparation thereof through reductive coupling; U.S. Pat. No. 5,457,191, drawn to modified nucleobases based on the 3-deazapurine ring system and methods of synthesis thereof; U.S. Pat. No. 5,459,255, drawn to modified nucleobases based on N-2 substituted purines; U.S. Pat. No. 5,521,302, drawn to processes for preparing oligonucleotides having chiral phosphorus linkages; U.S. Pat. No. 5,539,082, drawn to peptide nucleic acids; U.S. Pat. No. 5,554,746, drawn to oligonucleotides having β-lactam backbones; U.S. Pat. No. 5,571,902, drawn to methods and materials for the synthesis of oligonucleotides; U.S. Pat. No. 5,578,718, drawn to nucleosides having alkylthio groups, wherein such groups may be used as linkers to other moieties attached at any of a variety of positions of the nucleoside; U.S. Pat. Nos. 5,587,361 and 5,599,797, drawn to oligonucleotides having phosphorothioate linkages of high chiral purity; U.S. Pat. No. 5,506,351, drawn to processes for the preparation of 2′-O-alkyl guanosine and related compounds, including 2,6-diaminopurine compounds; U.S. Pat. No. 5,587,469, drawn to oligonucleotides having N-2 substituted purines; U.S. Pat. No. 5,587,470, drawn to oligonucleotides having 3-deazapurines; U.S. Pat. No. 5,223,168, and U.S. Pat. No. 5,608,046, both drawn to conjugated 4′-desmethyl nucleoside analogs; U.S. Pat. Nos. 5,602,240, and 5,610,289, drawn to backbone-modified oligonucleotide analogs; U.S. Pat. Nos. 6,262,241, and 5,459,255, drawn to, inter alia, methods of synthesizing 2′-fluoro-oligonucleotides.

[0112] In the ligand-conjugated dsRNA and ligand-molecule bearing sequence-specific linked nucleosides of the invention, the oligonucleotides and oligonucleosides may be assembled on a suitable DNA synthesizer utilizing standard nucleotide or nucleoside precursors, or nucleotide or nucleoside conjugate precursors that already bear the linking moiety, ligand-nucleotide or nucleoside-conjugate precursors that already bear the ligand molecule, or non-nucleoside ligand-bearing building blocks.

[0113] When using nucleotide-conjugate precursors that already bear a linking moiety, the synthesis of the sequence-specific linked nucleosides is typically completed, and the ligand molecule is then reacted with the linking moiety to form the ligand-conjugated oligonucleotide. Oligonucleotide conjugates bearing a variety of molecules such as steroids, vitamins, lipids and reporter molecules, has previously been described (see Manoharan et al., PCT Application WO 93/07883). In one embodiment, the oligonucleotides or linked nucleosides featured in the invention are synthesized by an automated synthesizer using phosphoramidites derived from ligand-nucleoside conjugates in addition to the standard phosphoramidites and non-standard phosphoramidites that are commercially available and routinely used in oligonucleotide synthesis.

[0114] The incorporation of a 2′-O-methyl, 2′-O-ethyl, 2′-O-propyl, 2′-O-allyl, 2′-O-aminoalkyl or 2′-deoxy-2′-fluoro group in nucleosides of an oligonucleotide confers enhanced hybridization properties to the oligonucleotide. Further, oligonucleotides containing phosphorothioate backbones have enhanced nuclease stability. Thus, functionalized, linked nucleosides of the invention can be augmented to include either or both a phosphorothioate backbone or a 2′-O-methyl, 2′-O-ethyl, 2′-O-propyl, 2′-O-aminoalkyl, 2′-O-allyl or 2′-deoxy-2′-fluoro group. A summary listing of some of the oligonucleotide modifications known in the art is found at, for example, PCT Publication WO 200370918.

[0115] In some embodiments, functionalized nucleoside sequences of the invention possessing an amino group at the 5′-terminus are prepared using a DNA synthesizer, and then reacted with an active ester derivative of a selected ligand. Active ester derivatives are well known to those skilled in the art. Representative active esters include N-hydrosuccinimide esters, tetrafluorophenolic esters, pentafluorophenolic esters and pentachlorophenolic esters. The reaction of the amino group and the active ester produces an oligonucleotide in which the selected ligand is attached to the 5′-position through a linking group. The amino group at the 5′-terminus can be prepared utilizing a 5′-Amino-Modifier C6 reagent. In one embodiment, ligand molecules may be conjugated to oligonucleotides at the 5′-position by the use of a ligand-nucleoside phosphoramidite wherein the ligand is linked to the 5′-hydroxy group directly or indirectly via a linker. Such ligand-nucleoside phosphoramidites are typically used at the end of an automated synthesis procedure to provide a ligand-conjugated oligonucleotide bearing the ligand at the 5′-terminus.

[0116] Examples of modified internucleoside linkages or backbones include, for example, phosphorothioates, chiral phosphorothioates, phosphorodithioates, phosphotriesters, aminoalkylphosphotriesters, methyl and other alkyl phosphonates including 3′-alkylene phosphonates and chiral phosphonates, phosphinates, phosphoramidates including 3′-amino phosphoramidate and aminoalkylphosphoramidates, thionophosphoramidates, thionoalkylphosphonates, thionoalkylphosphotriesters, and boranophosphates having normal 3′-5′ linkages, 2′-5′ linked analogs of these, and those having inverted polarity wherein the adjacent pairs of nucleoside units are linked 3′-5′ to 5′-3′ or 2′-5′ to 5′-2′. Various salts, mixed salts and free-acid forms are also included.

[0117] Representative United States patents relating to the preparation of the above phosphorus-atom-containing linkages include, but are not limited to, U.S. Pat. Nos. 3,687,808; 4,469,863; 4,476,301; 5,023,243; 5,177,196; 5,188,897; 5,264,423; 5,276,019; 5,278,302; 5,286,717; 5,321,131; 5,399,676; 5,405,939; 5,453,496; 5,455,233; 5,466,677; 5,476,925; 5,519,126; 5,536,821; 5,541,306; 5,550,111; 5,563,253; 5,571,799; 5,587,361; 5,625,050; and 5,697,248, each of which is herein incorporated by reference.

[0118] Examples of modified internucleoside linkages or backbones that do not include a phosphorus atom therein (i.e., oligonucleosides) have backbones that are formed by short chain alkyl or cycloalkyl intersugar linkages, mixed heteroatom and alkyl or cycloalkyl intersugar linkages, or one or more short chain heteroatomic or heterocyclic intersugar linkages. These include those having morpholino linkages (formed in part from the sugar portion of a nucleoside); siloxane backbones; sulfide, sulfoxide and sulfone backbones;

[0119] formacetyl and thioformacetyl backbones; methylene formacetyl and thioformacetyl backbones; alkene containing backbones; sulfamate backbones; methyleneimino and methylenehydrazino backbones; sulfonate and sulfonamide backbones; amide backbones; and others having mixed N, O, S and CH₂ component parts.

[0120] Representative United States patents relating to the preparation of the above oligonucleosides include, but are not limited to, U.S. Pat. Nos. 5,034,506; 5,166,315; 5,185,444; 5,214,134; 5,216,141; 5,235,033; 5,264,562; 5,264,564; 5,405,938; 5,434,257; 5,466,677; 5,470,967; 5,489,677; 5,541,307; 5,561,225; 5,596,086; 5,602,240; 5,610,289; 5,602,240; 5,608,046; 5,610,289; 5,618,704; 5,623,070; 5,663,312; 5,633,360; 5,677,437; and 5,677,439, each of which is herein incorporated by reference.

[0121] In certain instances, the oligonucleotide may be modified by a non-ligand group. A number of non-ligand molecules have been conjugated to oligonucleotides in order to enhance the activity, cellular distribution or cellular uptake of the oligonucleotide, and procedures for performing such conjugations are available in the scientific literature. Such non-ligand moieties have included lipid moieties, such as cholesterol (Letsinger et al., Proc. Natl. Acad. Sci. USA, 1989, 86:6553), cholic acid (Manoharan et al., Bioorg. Med. Chem. Left., 1994, 4:1053), a thioether, e.g., hexyl-S-tritylthiol (Manoharan et al., Ann. N.Y. Acad. Sci., 1992, 660:306; Manoharan et al., Bioorg. Med. Chem. Let., 1993, 3:2765), a thiocholesterol (Oberhauser et al., Nucl. Acids Res., 1992, 20:533), an aliphatic chain, e.g., dodecandiol or undecyl residues (Saison-Behmoaras et al., EMBO J., 1991, 10:111; Kabanov et al., FEBS Lett., 1990, 259:327; Svinarchuk et al., Biochimie, 1993, 75:49), a phospholipid, e.g., di-hexadecyl-rac-glycerol or triethylammonium 1,2-di-O-hexadecyl-rac-glycero-3-H-phosphonate (Manoharan et al., Tetrahedron Lett., 1995, 36:3651; Shea et al., Nucl. Acids Res., 1990, 18:3777), a polyamine or a polyethylene glycol chain (Manoharan et al., Nucleosides & Nucleotides, 1995, 14:969), or adamantane acetic acid (Manoharan et al., Tetrahedron Lett., 1995, 36:3651), a palmityl moiety (Mishra et al., Biochim. Biophys. Acta, 1995, 1264:229), or an octadecylamine or hexylamino-carbonyl-oxycholesterol moiety (Crooke et al., J. Pharmacol. Exp. Ther., 1996, 277:923). Representative United States patents that teach the preparation of such oligonucleotide conjugates have been listed above. Typical conjugation protocols involve the synthesis of oligonucleotides bearing an aminolinker at one or more positions of the sequence. The amino group is then reacted with the molecule being conjugated using appropriate coupling or activating reagents. The conjugation reaction may be performed either with the oligonucleotide still bound to the solid support or following cleavage of the oligonucleotide in solution phase. Purification of the oligonucleotide conjugate by HPLC typically affords the pure conjugate. The use of a cholesterol conjugate is particularly preferred since such a moiety can increase targeting liver cells, a site of PCSK9 expression.

[0122] Vector Encoded RNAi Agents

[0123] In another aspect of the invention, PCSK9 specific dsRNA molecules that modulate PCSK9 gene expression activity are expressed from transcription units inserted into DNA or RNA vectors (see, e.g., Couture, A, et al., TIG. (1996), 12:5-10; Skillern, A., et al., International PCT Publication No. WO 00/22113, Conrad, International PCT Publication No. WO 00/22114, and Conrad, U.S. Pat. No. 6,054,299). These transgenes can be introduced as a linear construct, a circular plasmid, or a viral vector, which can be incorporated and inherited as a transgene integrated into the host genome. The transgene can also be constructed to permit it to be inherited as an extrachromosomal plasmid (Gassmann, et al., Proc. Natl. Acad. Sci. USA (1995) 92:1292).

[0124] The individual strands of a dsRNA can be transcribed by promoters on two separate expression vectors and co-transfected into a target cell. Alternatively each individual strand of the dsRNA can be transcribed by promoters both of which are located on the same expression plasmid. In one embodiment, a dsRNA is expressed as an inverted repeat joined by a linker polynucleotide sequence such that the dsRNA has a stem and loop structure.

[0125] The recombinant dsRNA expression vectors are generally DNA plasmids or viral vectors. dsRNA expressing viral vectors can be constructed based on, but not limited to, adeno-associated virus (for a review, see Muzyczka, et al., Curr. Topics Micro. Immunol. (1992) 158:97-129)); adenovirus (see, for example, Berkner, et al., BioTechniques (1998) 6:616), Rosenfeld et al. (1991, Science 252:431-434), and Rosenfeld et al. (1992), Cell 68:143-155)); or alphavirus as well as others known in the art. Retroviruses have been used to introduce a variety of genes into many different cell types, including epithelial cells, in vitro and/or in vivo (see, e.g., Eglitis, et al., Science (1985) 230:1395-1398; Danos and Mulligan, Proc. Natl. Acad. Sci. USA (1998) 85:6460-6464; Wilson et al., 1988, Proc. Natl. Acad. Sci. USA 85:3014-3018; Armentano et al., 1990, Proc. Natl. Acad. Sci. USA 87:61416145; Huber et al., 1991, Proc. Natl. Acad. Sci. USA 88:8039-8043; Ferry et al., 1991, Proc. Natl. Acad. Sci. USA 88:8377-8381; Chowdhury et al., 1991, Science 254:1802-1805; van Beusechem. et al., 1992, Proc. Nad. Acad. Sci. USA 89:7640-19; Kay et al., 1992, Human Gene Therapy 3:641-647; Dai et al., 1992, Proc. Natl. Acad. Sci. USA 89:10892-10895; Hwu et al., 1993, J. Immunol. 150:4104-4115; U.S. Pat. No. 4,868,116; U.S. Pat. No. 4,980,286; PCT Application WO 89/07136; PCT Application WO 89/02468; PCT Application WO 89/05345; and PCT Application WO 92/07573). Recombinant retroviral vectors capable of transducing and expressing genes inserted into the genome of a cell can be produced by transfecting the recombinant retroviral genome into suitable packaging cell lines such as PA317 and Psi-CRIP (Comette et al., 1991, Human Gene Therapy 2:5-10; Cone et al., 1984, Proc. Natl. Acad. Sci. USA 81:6349). Recombinant adenoviral vectors can be used to infect a wide variety of cells and tissues in susceptible hosts (e.g., rat, hamster, dog, and chimpanzee) (Hsu et al., 1992, J. Infectious Disease, 166:769), and also have the advantage of not requiring mitotically active cells for infection.

[0126] Any viral vector capable of accepting the coding sequences for the dsRNA molecule(s) to be expressed can be used, for example vectors derived from adenovirus (AV); adeno-associated virus (AAV); retroviruses (e.g., lentiviruses (LV), Rhabdoviruses, murine leukemia virus); herpes virus, and the like. The tropism of viral vectors can be modified by pseudotyping the vectors with envelope proteins or other surface antigens from other viruses, or by substituting different viral capsid proteins, as appropriate.

[0127] For example, lentiviral vectors of the invention can be pseudotyped with surface proteins from vesicular stomatitis virus (VSV), rabies, Ebola, Mokola, and the like. AAV vectors of the invention can be made to target different cells by engineering the vectors to express different capsid protein serotypes. For example, an AAV vector expressing a serotype 2 capsid on a serotype 2 genome is called AAV 2/2. This serotype 2 capsid gene in the AAV 2/2 vector can be replaced by a serotype 5 capsid gene to produce an AAV 2/5 vector. Techniques for constructing AAV vectors which express different capsid protein serotypes are within the skill in the art; see, e.g., Rabinowitz J E et al. (2002), J. Virol 76:791-801, the entire disclosure of which is herein incorporated by reference.

[0128] Selection of recombinant viral vectors suitable for use in the invention, methods for inserting nucleic acid sequences for expressing the dsRNA into the vector, and methods of delivering the viral vector to the cells of interest are within the skill in the art. See, for example, Dornburg R (1995), Gene Therap. 2: 301-310; Eglitis M A (1988), Biotechniques 6: 608-614; Miller A D (1990), Hum Gene Therap. 1: 5-14; Anderson W F (1998), Nature 392: 25-30; and Rubinson D A et al., Nat. Genet. 33: 401-406, the entire disclosures of which are herein incorporated by reference.

[0129] Preferred viral vectors are those derived from AV and AAV. In a particularly preferred embodiment, the dsRNA of the invention is expressed as two separate, complementary single-stranded RNA molecules from a recombinant AAV vector having, for example, either the U6 or H1 RNA promoters, or the cytomegalovirus (CMV) promoter.

[0130] A suitable AV vector for expressing the dsRNA of the invention, a method for constructing the recombinant AV vector, and a method for delivering the vector into target cells, are described in Xia H et al. (2002), Nat. Biotech. 20: 1006-1010.

[0131] Suitable AAV vectors for expressing the dsRNA of the invention, methods for constructing the recombinant AV vector, and methods for delivering the vectors into target cells are described in Samulski R et al. (1987), J. Virol. 61: 3096-3101; Fisher K J et al. (1996), J. Virol, 70: 520-532; Samulski R et al. (1989), J. Virol. 63: 3822-3826; U.S. Pat. No. 5,252,479; U.S. Pat. No. 5,139,941; International Patent Application No. WO 94/13788; and International Patent Application No. WO 93/24641, the entire disclosures of which are herein incorporated by reference.

[0132] The promoter driving dsRNA expression in either a DNA plasmid or viral vector of the invention may be a eukaryotic RNA polymerase I (e.g. ribosomal RNA promoter), RNA polymerase II (e.g. CMV early promoter or actin promoter or U1 snRNA promoter) or generally RNA polymerase III promoter (e.g. U6 snRNA or 7SK RNA promoter) or a prokaryotic promoter, for example the T7 promoter, provided the expression plasmid also encodes T7 RNA polymerase required for transcription from a T7 promoter. The promoter can also direct transgene expression to the pancreas (see, e.g., the insulin regulatory sequence for pancreas (Bucchini et al., 1986, Proc. Natl. Acad. Sci. USA 83:2511-2515)).

[0133] In addition, expression of the transgene can be precisely regulated, for example, by using an inducible regulatory sequence and expression systems such as a regulatory sequence that is sensitive to certain physiological regulators, e.g., circulating glucose levels, or hormones (Docherty et al., 1994, FASEB J. 8:20-24). Such inducible expression systems, suitable for the control of transgene expression in cells or in mammals include regulation by ecdysone, by estrogen, progesterone, tetracycline, chemical inducers of dimerization, and isopropyl-beta-D1-thiogalactopyranoside (EPTG). A person skilled in the art would be able to choose the appropriate regulatory/promoter sequence based on the intended use of the dsRNA transgene.

[0134] Generally, recombinant vectors capable of expressing dsRNA molecules are delivered as described below, and persist in target cells. Alternatively, viral vectors can be used that provide for transient expression of dsRNA molecules. Such vectors can be repeatedly administered as necessary. Once expressed, the dsRNAs bind to target RNA and modulate its function or expression. Delivery of dsRNA expressing vectors can be systemic, such as by intravenous or intramuscular administration, by administration to target cells ex-planted from the patient followed by reintroduction into the patient, or by any other means that allows for introduction into a desired target cell.

[0135] dsRNA expression DNA plasmids are typically transfected into target cells as a complex with cationic lipid carriers (e.g. Oligofectamine) or non-cationic lipid-based carriers (e.g. Transit-TKO™). Multiple lipid transfections for dsRNA-mediated knockdowns targeting different regions of a single PCSK9 gene or multiple PCSK9 genes over a period of a week or more are also contemplated by the invention. Successful introduction of the vectors of the invention into host cells can be monitored using various known methods. For example, transient transfection. can be signaled with a reporter, such as a fluorescent marker, such as Green Fluorescent Protein (GFP). Stable transfection of ex vivo cells can be ensured using markers that provide the transfected cell with resistance to specific environmental factors (e.g., antibiotics and drugs), such as hygromycin B resistance.

[0136] The PCSK9 specific dsRNA molecules can also be inserted into vectors and used as gene therapy vectors for human patients. Gene therapy vectors can be delivered to a subject by, for example, intravenous injection, local administration (see U.S. Pat. No. 5,328,470) or by stereotactic injection (see e.g., Chen et al. (1994) Proc. Natl. Acad. Sci. USA 91:3054-3057). The pharmaceutical preparation of the gene therapy vector can include the gene therapy vector in an acceptable diluent, or can include a slow release matrix in which the gene delivery vehicle is imbedded. Alternatively, where the complete gene delivery vector can be produced intact from recombinant cells, e.g., retroviral vectors, the pharmaceutical preparation can include one or more cells which produce the gene delivery system.

[0137] Pharmaceutical Compositions Containing dsRNA

[0138] In one embodiment, the invention provides pharmaceutical compositions containing a dsRNA, as described herein, and a pharmaceutically acceptable carrier and methods of administering the same. The pharmaceutical composition containing the dsRNA is useful for treating a disease or disorder associated with the expression or activity of a PCSK9 gene, such as pathological processes mediated by PCSK9 expression, e.g., hyperlipidemia. Such pharmaceutical compositions are formulated based on the mode of delivery.

[0139] Dosage

[0140] The pharmaceutical compositions featured herein are administered in dosages sufficient to inhibit expression of PCSK9 genes. In general, a suitable dose of dsRNA will be in the range of 0.01 to 200.0 milligrams per kilogram body weight of the recipient per day, generally in the range of 1 to 50 mg per kilogram body weight per day. For example, the dsRNA can be administered at 0.01 mg/kg, 0.05 mg/kg, 0.5 mg/kg, 1 mg/kg, 1.5 mg/kg, 2.0 mg/kg, 3.0 mg/kg, 5.0 mg/kg, 10 mg/kg, 20 mg/kg, 30 mg/kg, 40 mg/kg, or 50 mg/kg per single dose.

[0141] In another embodiment, the dosage is between 0.01 and 0.2 mg/kg. For example, the dsRNA can be administered at a dose of 0.01 mg/kg, 0.02 mg/kg, 0.03 mg/kg, 0.04 mg/kg, 0.05 mg/kg, 0.06 mg/kg, 0.07 mg/kg 0.08 mg/kg 0.09 mg/kg, 0.10 mg/kg, 0.11 mg/kg, 0.12 mg/kg, 0.13 mg/kg, 0.14 mg/kg, 0.15 mg/kg, 0.16 mg/kg, 0.17 mg/kg, 0.18 mg/kg, 0.19 mg/kg, or 0.20 mg/kg.

[0142] In one embodiment, the dosage is between 0.2 mg/kg and 1.5 mg/kg. For example, the dsRNA can be administered at a dose of 0.2 mg/kg, 0.3 mg/kg, 0.4 mg/kg, 0.5 mg/kg, 0.6 mg/kg, 0.7 mg/kg, 0.8 mg/kg, 0.9 mg/kg, 1 mg/kg, 1.1 mg/kg, 1.2 mg/kg, 1.3 mg/kg, 1.4 mg/kg, or 1.5 mg/kg.

[0143] The dsRNA can be administered at a dose of 0.03, 0.1, 0.3, or 1.3, or 3.0 mg/kg.

[0144] The pharmaceutical composition can be administered once daily, or the dsRNA may be administered as two, three, or more sub-doses at appropriate intervals throughout the day. The effect of a single dose on PCSK9 levels is long lasting, such that subsequent doses are administered at not more than 7 day intervals, or at not more than 1, 2, 3, or 4 week intervals.

[0145] In one embodiment the lipid formulated PCSK9 targeted dsRNA is administered at a first dose of about 3 mg/kg followed by administering at least one subsequent dose once a week, wherein the subsequent dose is lower than the first dose, e.g., the subsequent dose is about 1.0 mg/kg or about 0.3 mg/kg. The subsequent dose can be administered, e.g., once a week for four weeks.

[0146] In some embodiments the dsRNA is administered using continuous infusion or delivery through a controlled release formulation. In that case, the dsRNA contained in each sub-dose must be correspondingly smaller in order to achieve the total daily dosage. The dosage unit can also be compounded for delivery over several days, e.g., using a conventional sustained release formulation which provides sustained release of the dsRNA over a several day period. Sustained release formulations are well known in the art and are particularly useful for delivery of agents at a particular site, such as could be used with the agents of the present invention. In this embodiment, the dosage unit contains a corresponding multiple of the daily dose.

[0147] The skilled artisan will appreciate that certain factors may influence the dosage and timing required to effectively treat a subject, including but not limited to the severity of the disease or disorder, previous treatments, the general health and/or age of the subject, and other diseases present. Moreover, treatment of a subject with a therapeutically effective amount of a composition can include a single treatment or a series of treatments. Estimates of effective dosages and in vivo half-lives for the individual dsRNAs encompassed by the invention can be made using conventional methodologies or on the basis of in vivo testing using an appropriate animal model, as described elsewhere herein.

[0148] Advances in mouse genetics have generated a number of mouse models for the study of various human diseases, such as pathological processes mediated by PCSK9 expression. Such models are used for in vivo testing of dsRNA, as well as for determining a therapeutically effective dose. A suitable mouse model is, for example, a mouse containing a plasmid expressing human PCSK9. Another suitable mouse model is a transgenic mouse carrying a transgene that expresses human PCSK9.

[0149] Toxicity and therapeutic efficacy of such compounds can be determined by standard pharmaceutical procedures in cell cultures or experimental animals, e.g., for determining the LD50 (the dose lethal to 50% of the population) and the ED50 (the dose therapeutically effective in 50% of the population). The dose ratio between toxic and therapeutic effects is the therapeutic index and it can be expressed as the ratio LD50/ED50. Compounds that exhibit high therapeutic indices are preferred.

[0150] The data obtained from cell culture assays and animal studies can be used in formulating a range of dosage for use in humans. The dosage of compositions featured in the invention lies generally within a range of circulating concentrations that include the ED50 with little or no toxicity. The dosage may vary within this range depending upon the dosage form employed and the route of administration utilized. For any compound used in the methods featured in the invention, the therapeutically effective dose can be estimated initially from cell culture assays. A dose may be formulated in animal models to achieve a circulating plasma concentration range of the compound or, when appropriate, of the polypeptide product of a target sequence (e.g., achieving a decreased concentration of the polypeptide) that includes the IC50 (i.e., the concentration of the test compound which achieves a half-maximal inhibition of symptoms) as determined in cell culture. Such information can be used to more accurately determine useful doses in humans. Levels in plasma may be measured, for example, by high performance liquid chromatography.

[0151] In addition to their administration, as discussed above, the dsRNAs featured in the invention can be administered in combination with other known agents effective in treatment of pathological processes mediated by target gene expression. In any event, the administering physician can adjust the amount and timing of dsRNA administration on the basis of results observed using standard measures of efficacy known in the art or described herein.

[0152] Administration

[0153] The pharmaceutical compositions of the present invention may be administered in a number of ways depending upon whether local or systemic treatment is desired and upon the area to be treated. Administration may be topical, pulmonary, e.g., by inhalation or insufflation of powders or aerosols, including by nebulizer; intratracheal, intranasal, epidermal and transdermal, and subdermal, oral or parenteral, e.g., subcutaneous.

[0154] Typically, when treating a mammal with hyperlipidemia, the dsRNA molecules are administered systemically via parental means. Parenteral administration includes intravenous, intra-arterial, subcutaneous, intraperitoneal or intramuscular injection or infusion; or intracranial, e.g., intraparenchymal, intrathecal or intraventricular, administration. For example, dsRNAs, conjugated or unconjugate or formulated with or without liposomes, can be administered intravenously to a patient. For such, a dsRNA molecule can be formulated into compositions such as sterile and non-sterile aqueous solutions, non-aqueous solutions in common solvents such as alcohols, or solutions in liquid or solid oil bases. Such solutions also can contain buffers, diluents, and other suitable additives. For parenteral, intrathecal, or intraventricular administration, a dsRNA molecule can be formulated into compositions such as sterile aqueous solutions, which also can contain buffers, diluents, and other suitable additives (e.g., penetration enhancers, carrier compounds, and other pharmaceutically acceptable carriers). Formulations are described in more detail herein.

[0155] The dsRNA can be delivered in a manner to target a particular tissue, such as the liver (e.g., the hepatocytes of the liver).

[0156] Formulations

[0157] The pharmaceutical formulations of the present invention, which may conveniently be presented in unit dosage form, may be prepared according to conventional techniques well known in the pharmaceutical industry. Such techniques include the step of bringing into association the active ingredients with the pharmaceutical carrier(s) or excipient(s). In general, the formulations are prepared by uniformly and intimately bringing into association the active ingredients with liquid carriers or finely divided solid carriers or both, and then, if necessary, shaping the product.

[0158] The compositions of the present invention may be formulated into any of many possible dosage forms such as, but not limited to, tablets, capsules, gel capsules, liquid syrups, soft gels, suppositories, and enemas. The compositions of the present invention may also be formulated as suspensions in aqueous, non-aqueous or mixed media. Aqueous suspensions may further contain substances which increase the viscosity of the suspension including, for example, sodium carboxymethylcellulose, sorbitol and/or dextran. The suspension may also contain stabilizers.

[0159] Pharmaceutical compositions of the present invention include, but are not limited to, solutions, emulsions, and liposome-containing formulations. These compositions may be generated from a variety of components that include, but are not limited to, preformed liquids, self-emulsifying solids and self-emulsifying semisolids. In one aspect are formulations that target the liver when treating hepatic disorders such as hyperlipidemia.

[0160] In addition, dsRNA that target the PCSK9 gene can be formulated into compositions containing the dsRNA admixed, encapsulated, conjugated, or otherwise associated with other molecules, molecular structures, or mixtures of nucleic acids. For example, a composition containing one or more dsRNA agents that target the PCSK9 gene can contain other therapeutic agents, such as other cancer therapeutics or one or more dsRNA compounds that target non-PCSK9 genes.

[0161] Oral, Parenteral, Topical, and Biologic Formulations

[0162] Compositions and formulations for oral administration include powders or granules, microparticulates, nanoparticulates, suspensions or solutions in water or non-aqueous media, capsules, gel capsules, sachets, tablets or minitablets. Thickeners, flavoring agents, diluents, emulsifiers, dispersing aids or binders may be desirable. In some embodiments, oral formulations are those in which dsRNAs featured in the invention are administered in conjunction with one or more penetration enhancers surfactants and chelators. Suitable surfactants include fatty acids and/or esters or salts thereof, bile acids and/or salts thereof. Suitable bile acids/salts include chenodeoxycholic acid (CDCA) and ursodeoxychenodeoxycholic acid (UDCA), cholic acid, dehydrocholic acid, deoxycholic acid, glucholic acid, glycholic acid, glycodeoxycholic acid, taurocholic acid, taurodeoxycholic acid, sodium tauro-24,25-dihydro-fusidate and sodium glycodihydrofusidate. Suitable fatty acids include arachidonic acid, undecanoic acid, oleic acid, lauric acid, caprylic acid, capric acid, myristic acid, palmitic acid, stearic acid, linoleic acid, linolenic acid, dicaprate, tricaprate, monoolein, dilaurin, glyceryl 1-monocaprate, 1-dodecylazacycloheptan-2-one, an acylcarnitine, an acylcholine, or a monoglyceride, a diglyceride or a pharmaceutically acceptable salt thereof (e.g., sodium). In some embodiments, combinations of penetration enhancers are used, for example, fatty acids/salts in combination with bile acids/salts. One exemplary combination is the sodium salt of lauric acid, capric acid and UDCA. Further penetration enhancers include polyoxyethylene-9-lauryl ether, polyoxyethylene-20-cetyl ether. dsRNAs featured in the invention may be delivered orally, in granular form including sprayed dried particles, or complexed to form micro or nanoparticles. dsRNA complexing agents include poly-amino acids; polyimines; polyacrylates; polyalkylacrylates, polyoxethanes, polyalkylcyanoacrylates; cationized gelatins, albumins, starches, acrylates, polyethyleneglycols (PEG) and starches; polyalkylcyanoacrylates; DEAE-derivatized polyimines, pollulans, celluloses and starches. Suitable complexing agents include chitosan, N-trimethylchitosan, poly-L-lysine, polyhistidine, polyornithine, polyspermines, protamine, polyvinylpyridine, polythiodiethylaminomethylethylene P(TDAE), polyaminostyrene (e.g., p-amino), poly(methylcyanoacrylate), poly(ethylcyanoacrylate), poly(butylcyanoacrylate), poly(isobutylcyanoacrylate), poly(isohexylcynaoacrylate), DEAE-methacrylate, DEAE-hexylacrylate, DEAE-acrylamide, DEAE-albumin and DEAE-dextran, polymethylacrylate, polyhexylacrylate, poly(D,L-lactic acid), poly(DL-lactic-co-glycolic acid (PLGA), alginate, and polyethyleneglycol (PEG). Oral formulations for dsRNAs and their preparation are described in detail in U.S. Pat. No. 6,887,906, U.S. Patent Publication. No. 20030027780, and U.S. Pat. No. 6,747,014, each of which is incorporated herein by reference.

[0163] Compositions and formulations for parenteral, intraparenchymal (into the brain), intrathecal, intraventricular or intrahepatic administration may include sterile aqueous solutions which may also contain buffers, diluents and other suitable additives such as, but not limited to, penetration enhancers, carrier compounds and other pharmaceutically acceptable carriers or excipients.

[0164] Pharmaceutical compositions and formulations for topical administration may include transdermal patches, ointments, lotions, creams, gels, drops, suppositories, sprays, liquids and powders. Conventional pharmaceutical carriers, aqueous, powder or oily bases, thickeners and the like may be necessary or desirable. Suitable topical formulations include those in which the dsRNAs featured in the invention are in admixture with a topical delivery agent such as lipids, liposomes, fatty acids, fatty acid esters, steroids, chelating agents and surfactants. Suitable lipids and liposomes include neutral (e.g., dioleoylphosphatidyl DOPE ethanolamine, dimyristoylphosphatidyl choline DMPC, distearolyphosphatidyl choline) negative (e.g., dimyristoylphosphatidyl glycerol DMPG) and cationic (e.g., dioleoyltetramethylaminopropyl DOTAP and dioleoylphosphatidyl ethanolamine DOTMA). dsRNAs featured in the invention may be encapsulated within liposomes or may form complexes thereto, in particular to cationic liposomes. Alternatively, dsRNAs may be complexed to lipids, in particular to cationic lipids. Suitable fatty acids and esters include but are not limited to arachidonic acid, oleic acid, eicosanoic acid, lauric acid, caprylic acid, capric acid, myristic acid, palmitic acid, stearic acid, linoleic acid, linolenic acid, dicaprate, tricaprate, monoolein, dilaurin, glyceryl 1-monocaprate, 1-dodecylazacycloheptan-2-one, an acylcarnitine, an acylcholine, or a C₁₋₁₀ alkyl ester (e.g., isopropylmyristate IPM), monoglyceride, diglyceride or pharmaceutically acceptable salt thereof. Topical formulations are described in detail in U.S. Pat. No. 6,747,014, which is incorporated herein by reference. In addition, dsRNA molecules can be administered to a mammal as biologic or abiologic means as described in, for example, U.S. Pat. No. 6,271,359. Abiologic delivery can be accomplished by a variety of methods including, without limitation, (1) loading liposomes with a dsRNA acid molecule provided herein and (2) complexing a dsRNA molecule with lipids or liposomes to form nucleic acid-lipid or nucleic acid-liposome complexes. The liposome can be composed of cationic and neutral lipids commonly used to transfect cells in vitro. Cationic lipids can complex (e.g., charge-associate) with negatively charged nucleic acids to form liposomes. Examples of cationic liposomes include, without limitation, lipofectin, lipofectamine, lipofectace, and DOTAP. Procedures for forming liposomes are well known in the art. Liposome compositions can be formed, for example, from phosphatidylcholine, dimyristoyl phosphatidylcholine, dipalmitoyl phosphatidylcholine, dimyristoyl phosphatidylglycerol, or dioleoyl phosphatidylethanolamine. Numerous lipophilic agents are commercially available, including Lipofectin™ (Invitrogen/Life Technologies, Carlsbad, Calif.) and Effectene (Qiagen, Valencia, Calif.). In addition, systemic delivery methods can be optimized using commercially available cationic lipids such as DDAB or DOTAP, each of which can be mixed with a neutral lipid such as DOPE or cholesterol. In some cases, liposomes such as those described by Templeton et al. (Nature Biotechnology, 15: 647-652 (1997)) can be used. In other embodiments, polycations such as polyethyleneimine can be used to achieve delivery in vivo and ex vivo (Boletta et al., J. Am Soc. Nephrol. 7: 1728 (1996)). Additional information regarding the use of liposomes to deliver nucleic acids can be found in U.S. Pat. No. 6,271,359, PCT Publication WO 96/40964 and Morrissey, D. et al. 2005. Nat Biotechnol. 23(8):1002-7.

[0165] Biologic delivery can be accomplished by a variety of methods including, without limitation, the use of viral vectors. For example, viral vectors (e.g., adenovirus and herpes virus vectors) can be used to deliver dsRNA molecules to liver cells. Standard molecular biology techniques can be used to introduce one or more of the dsRNAs provided herein into one of the many different viral vectors previously developed to deliver nucleic acid to cells. These resulting viral vectors can be used to deliver the one or more dsRNAs to cells by, for example, infection.

[0166] Liposomal Formulations

[0167] There are many organized surfactant structures besides microemulsions that have been studied and used for the formulation of drugs. These include monolayers, micelles, bilayers and vesicles. Vesicles, such as liposomes, have attracted great interest because of their specificity and the duration of action they offer from the standpoint of drug delivery. As used in the present invention, the term “liposome” means a vesicle composed of amphiphilic lipids arranged in a spherical bilayer or bilayers.

[0168] Liposomes are unilamellar or multilamellar vesicles which have a membrane formed from a lipophilic material and an aqueous interior. The aqueous portion contains the composition to be delivered. Cationic liposomes possess the advantage of being able to fuse to the cell wall. Non-cationic liposomes, although not able to fuse as efficiently with the cell wall, are taken up by macrophages in vivo.

[0169] In order to cross intact mammalian skin, lipid vesicles must pass through a series of fine pores, each with a diameter less than 50 nm, under the influence of a suitable transdermal gradient. Therefore, it is desirable to use a liposome which is highly deformable and able to pass through such fine pores.

[0170] Further advantages of liposomes include: liposomes obtained from natural phospholipids are biocompatible and biodegradable; liposomes can incorporate a wide range of water and lipid soluble drugs; and liposomes can protect encapsulated drugs in their internal compartments from metabolism and degradation (Rosoff, in Pharmaceutical Dosage Forms, Lieberman, Rieger and Banker (Eds.), 1988, Marcel Dekker, Inc., New York, N.Y., volume 1, p. 245). Important considerations in the preparation of liposome formulations are the lipid surface charge, vesicle size and the aqueous volume of the liposomes.

[0171] Liposomes are useful for the transfer and delivery of active ingredients to the site of action. Because the liposomal membrane is structurally similar to biological membranes, when liposomes are applied to a tissue, the liposomes start to merge with the cellular membranes and as the merging of the liposome and cell progresses, the liposomal contents are emptied into the cell where the active agent may act.

[0172] Liposomal formulations have been the focus of extensive investigation as the mode of delivery for many drugs. There is growing evidence that for topical administration, liposomes present several advantages over other formulations. Such advantages include reduced side-effects related to high systemic absorption of the administered drug, increased accumulation of the administered drug at the desired target, and the ability to administer a wide variety of drugs, both hydrophilic and hydrophobic, into the skin.

[0173] Several reports have detailed the ability of liposomes to deliver agents including high-molecular weight DNA into the skin. Compounds including analgesics, antibodies, hormones and high-molecular weight DNAs have been administered to the skin. The majority of applications resulted in the targeting of the upper epidermis

[0174] Liposomes fall into two broad classes. Cationic liposomes are positively charged liposomes which interact with the negatively charged DNA molecules to form a stable complex. The positively charged DNA/liposome complex binds to the negatively charged cell surface and is internalized in an endosome. Due to the acidic pH within the endosome, the liposomes are ruptured, releasing their contents into the cell cytoplasm (Wang et al., Biochem. Biophys. Res. Commun., 1987, 147, 980-985).

[0175] Liposomes which are pH-sensitive or negatively-charged, entrap DNA rather than complex with it. Since both the DNA and the lipid are similarly charged, repulsion rather than complex formation occurs. Nevertheless, some DNA is entrapped within the aqueous interior of these liposomes. pH-sensitive liposomes have been used to deliver DNA encoding the thymidine kinase gene to cell monolayers in culture. Expression of the exogenous gene was detected in the target cells (Zhou et al., Journal of Controlled Release, 1992, 19, 269-274).

[0176] One major type of liposomal composition includes phospholipids other than naturally-derived phosphatidylcholine. Neutral liposome compositions, for example, can be formed from dimyristoyl phosphatidylcholine (DMPC) or dipalmitoyl phosphatidylcholine (DPPC). Anionic liposome compositions generally are formed from dimyristoyl phosphatidylglycerol, while anionic fusogenic liposomes are formed primarily from dioleoyl phosphatidylethanolamine (DOPE). Another type of liposomal composition is formed from phosphatidylcholine (PC) such as, for example, soybean PC, and egg PC. Another type is formed from mixtures of phospholipid and/or phosphatidylcholine and/or cholesterol.

[0177] Several studies have assessed the topical delivery of liposomal drug formulations to the skin. Application of liposomes containing interferon to guinea pig skin resulted in a reduction of skin herpes sores while delivery of interferon via other means (e.g., as a solution or as an emulsion) were ineffective (Weiner et al., Journal of Drug Targeting, 1992, 2, 405-410). Further, an additional study tested the efficacy of interferon administered as part of a liposomal formulation to the administration of interferon using an aqueous system, and concluded that the liposomal formulation was superior to aqueous administration (du Plessis et al., Antiviral Research, 1992, 18, 259-265).

[0178] Non-ionic liposomal systems have also been examined to determine their utility in the delivery of drugs to the skin, in particular systems comprising non-ionic surfactant and cholesterol. Non-ionic liposomal formulations comprising Novasome I (glyceryl dilaurate/cholesterol/po-lyoxyethylene-10-stearyl ether) and Novasome II (glyceryl distearate/cholesterol/polyoxyethylene-10-stearyl ether) were used to deliver cyclosporin-A into the dermis of mouse skin. Results indicated that such non-ionic liposomal systems were effective in facilitating the deposition of cyclosporin-A into different layers of the skin (Hu et al., S. T. P. Pharma. Sci., 1994, 4, 6, 466).

[0179] Liposomes also include “sterically stabilized” liposomes, a term which, as used herein, refers to liposomes comprising one or more specialized lipids that, when incorporated into liposomes, result in enhanced circulation lifetimes relative to liposomes lacking such specialized lipids. Examples of sterically stabilized liposomes are those in which part of the vesicle-forming lipid portion of the liposome (A) comprises one or more glycolipids, such as monosialoganglioside Gₘᵢ, or (B) is derivatized with one or more hydrophilic polymers, such as a polyethylene glycol (PEG) moiety. While not wishing to be bound by any particular theory, it is thought in the art that, at least for sterically stabilized liposomes containing gangliosides, sphingomyelin, or PEG-derivatized lipids, the enhanced circulation half-life of these sterically stabilized liposomes derives from a reduced uptake into cells of the reticuloendothelial system (RES) (Allen et al., FEBS Letters, 1987, 223, 42; Wu et al., Cancer Research, 1993, 53, 3765).

[0180] Various liposomes comprising one or more glycolipids are known in the art. Papahadjopoulos et al. (Ann. N.Y. Acad. Sci., 1987, 507, 64) reported the ability of monosialoganglioside G_{M1}, galactocerebroside sulfate and phosphatidylinositol to improve blood half-lives of liposomes. These findings were expounded upon by Gabizon et al. (Proc. Natl. Acad. Sci. U.S.A., 1988, 85, 6949). U.S. Pat. No. 4,837,028 and WO 88/04924, both to Allen et al., disclose liposomes comprising (1) sphingomyelin and (2) the ganglioside G_{M1} or a galactocerebroside sulfate ester. U.S. Pat. No. 5,543,152 (Webb et al.) discloses liposomes comprising sphingomyelin. Liposomes comprising 1,2-sn-dimyristoylphosphat-idylcholine are disclosed in WO 97/13499 (Lim et al.).

[0181] Many liposomes comprising lipids derivatized with one or more hydrophilic polymers, and methods of preparation thereof, are known in the art. Sunamoto et al. (Bull. Chem. Soc. Jpn., 1980, 53, 2778) described liposomes comprising a nonionic detergent, 2C_{1215G}, that contains a PEG moiety. Illum et al. (FEBS Lett., 1984, 167, 79) noted that hydrophilic coating of polystyrene particles with polymeric glycols results in significantly enhanced blood half-lives. Synthetic phospholipids modified by the attachment of carboxylic groups of polyalkylene glycols (e.g., PEG) are described by Sears (U.S. Pat. Nos. 4,426,330 and 4,534,899). Klibanov et al. (FEBS Lett., 1990, 268, 235) described experiments demonstrating that liposomes comprising phosphatidylethanolamine (PE) derivatized with PEG or PEG stearate have significant increases in blood circulation half-lives. Blume et al. (Biochimica et Biophysica Acta, 1990, 1029, 91) extended such observations to other PEG-derivatized phospholipids, e.g., DSPE-PEG, formed from the combination of distearoylphosphatidylethanolamine (DSPE) and PEG. Liposomes having covalently bound PEG moieties on their external surface are described in European Patent No. EP 0 445 131 B1 and WO 90/04384 to Fisher. Liposome compositions containing 1-20 mole percent of PE derivatized with PEG, and methods of use thereof, are described by Woodle et al. (U.S. Pat. Nos. 5,013,556 and 5,356,633) and Martin et al. (U.S. Pat. No. 5,213,804 and European Patent No. EP 0 496 813 B1). Liposomes comprising a number of other lipid-polymer conjugates are disclosed in WO 91/05545 and U.S. Pat. No. 5,225,212 (both to Martin et al.) and in WO 94/20073 (Zalipsky et al.) Liposomes comprising PEG-modified ceramide lipids are described in WO 96/10391 (Choi et al). U.S. Pat. No. 5,540,935 (Miyazaki et al.) and U.S. Pat. No. 5,556,948 (Tagawa et al.) describe PEG-containing liposomes that can be further derivatized with functional moieties on their surfaces.

[0182] A number of liposomes comprising nucleic acids are known in the art. WO 96/40062 to Thierry et al. discloses methods for encapsulating high molecular weight nucleic acids in liposomes. U.S. Pat. No. 5,264,221 to Tagawa et al. discloses protein-bonded liposomes and asserts that the contents of such liposomes may include a dsRNA. U.S. Pat. No. 5,665,710 to Rahman et al. describes certain methods of encapsulating oligodeoxynucleotides in liposomes. WO 97/04787 to Love et al. discloses liposomes comprising dsRNAs targeted to the raf gene.

[0183] Transfersomes are yet another type of liposomes and are highly deformable lipid aggregates which are attractive candidates for drug delivery vehicles. Transfersomes may be described as lipid droplets which are so highly deformable that they are easily able to penetrate through pores which are smaller than the droplet. Transfersomes are adaptable to the environment in which they are used, e.g., they are self-optimizing (adaptive to the shape of pores in the skin), self-repairing, frequently reach their targets without fragmenting, and often self-loading. To make transfersomes, it is possible to add surface edge-activators, usually surfactants, to a standard liposomal composition. Transfersomes have been used to deliver serum albumin to the skin. The transfersome-mediated delivery of serum albumin has been shown to be as effective as subcutaneous injection of a solution containing serum albumin.

[0184] Surfactants find wide application in formulations such as emulsions (including microemulsions) and liposomes. The most common way of classifying and ranking the properties of the many different types of surfactants, both natural and synthetic, is by the use of the hydrophile/lipophile balance (HLB). The nature of the hydrophilic group (also known as the “head”) provides the most useful means for categorizing the different surfactants used in formulations (Rieger, in Pharmaceutical Dosage Forms, Marcel Dekker, Inc., New York, N.Y., 1988, p. 285).

[0185] If the surfactant molecule is not ionized, it is classified as a nonionic surfactant. Nonionic surfactants find wide application in pharmaceutical and cosmetic products and are usable over a wide range of pH values. In general their HLB values range from 2 to about 18 depending on their structure. Nonionic surfactants include nonionic esters such as ethylene glycol esters, propylene glycol esters, glyceryl esters, polyglyceryl esters, sorbitan esters, sucrose esters, and ethoxylated esters. Nonionic alkanolamides and ethers such as fatty alcohol ethoxylates, propoxylated alcohols, and ethoxylated/propoxylated block polymers are also included in this class. The polyoxyethylene surfactants are the most popular members of the nonionic surfactant class.

[0186] If the surfactant molecule carries a negative charge when it is dissolved or dispersed in water, the surfactant is classified as anionic. Anionic surfactants include carboxylates such as soaps, acyl lactylates, acyl amides of amino acids, esters of sulfuric acid such as alkyl sulfates and ethoxylated alkyl sulfates, sulfonates such as alkyl benzene sulfonates, acyl isethionates, acyl taurates and sulfosuccinates, and phosphates. The most important members of the anionic surfactant class are the alkyl sulfates and the soaps.

[0187] If the surfactant molecule carries a positive charge when it is dissolved or dispersed in water, the surfactant is classified as cationic. Cationic surfactants include quaternary ammonium salts and ethoxylated amines. The quaternary ammonium salts are the most used members of this class.

[0188] If the surfactant molecule has the ability to carry either a positive or negative charge, the surfactant is classified as amphoteric. Amphoteric surfactants include acrylic acid derivatives, substituted alkylamides, N-alkylbetaines and phosphatides.

[0189] The use of surfactants in drug products, formulations and in emulsions has been reviewed (Rieger, in Pharmaceutical Dosage Forms, Marcel Dekker, Inc., New York, N.Y., 1988, p. 285).

[0190] Nucleic Acid Lipid Particles

[0191] In one embodiment, a dsRNA featured in the invention is fully encapsulated in the lipid formulation, e.g., to form a nucleic acid-lipid particle, e.g., Nucleic acid-lipid particles typically contain a cationic lipid, a non-cationic lipid, a sterol, and a lipid that prevents aggregation of the particle (e.g., a PEG-lipid conjugate). Nucleic acid-lipid particles are extremely useful for systemic applications, as they exhibit extended circulation lifetimes following intravenous (i.v.) injection and accumulate at distal sites (e.g., sites physically separated from the administration site). In addition, the nucleic acids when present in the nucleic acid-lipid particles of the present invention are resistant in aqueous solution to degradation with a nuclease. Nucleic acid-lipid particles and their method of preparation are disclosed in, e.g., U.S. Pat. Nos. 5,976,567; 5,981,501; 6,534,484; 6,586,410; 6,815,432; and PCT Publication No. WO 96/40964.

[0192] Nucleic acid-lipid particles can further include one or more additional lipids and/or other components such as cholesterol. Other lipids may be included in the liposome compositions for a variety of purposes, such as to prevent lipid oxidation or to attach ligands onto the liposome surface. Any of a number of lipids may be present, including amphipathic, neutral, cationic, and anionic lipids. Such lipids can be used alone or in combination. Specific examples of additional lipid components that may be present are described herein.

[0193] Additional components that may be present in a nucleic acid-lipid particle include bilayer stabilizing components such as polyamide oligomers (see, e.g., U.S. Pat. No. 6,320,017), peptides, proteins, detergents, lipid-derivatives, such as PEG coupled to phosphatidylethanolamine and PEG conjugated to ceramides (see, U.S. Pat. No. 5,885,613).

[0194] A nucleic acid-lipid particle can include one or more of a second amino lipid or cationic lipid, a neutral lipid, a sterol, and a lipid selected to reduce aggregation of lipid particles during formation, which may result from steric stabilization of particles which prevents charge-induced aggregation during formation.

[0195] Nucleic acid-lipid particles include, e.g., a SPLP, pSPLP, and SNALP. The term “SNALP” refers to a stable nucleic acid-lipid particle, including SPLP. The term “SPLP” refers to a nucleic acid-lipid particle comprising plasmid DNA encapsulated within a lipid vesicle. SPLPs include “pSPLP,” which include an encapsulated condensing agent-nucleic acid complex as set forth in PCT Publication No. WO 00/03683.

[0196] The particles of the present invention typically have a mean diameter of about 50 nm to about 150 nm, more typically about 60 nm to about 130 nm, more typically about 70 nm to about 110 nm, most typically about 70 nm to about 90 nm, and are substantially nontoxic

[0197] In one embodiment, the lipid to drug ratio (mass/mass ratio) (e.g., lipid to dsRNA ratio) will be in the range of from about 1:1 to about 50:1, from about 1:1 to about 25:1, from about 3:1 to about 15:1, from about 4:1 to about 10:1, from about 5:1 to about 9:1, or about 6:1 to about 9:1, or about 6:1, 7:1, 8:1, 9:1, 10:1, 11:1, 12:1, or 33:1.

[0198] Cationic Lipids

[0199] The nucleic acid-lipid particles of the invention typically include a cationic lipid. The cationic lipid may be, for example, N,N-dioleyl-N,N-dimethylammonium chloride (DODAC), N,N-distearyl-N,N-dimethylammonium bromide (DDAB), N—(I-(2,3-dioleoyloxy)propyl)-N,N,N-trimethylammonium chloride (DOTAP), N—(I-(2,3-dioleyloxy)propyl)-N,N,N-trimethylammonium chloride (DOTMA), N,N-dimethyl-2,3-dioleyloxy)propylamine (DODMA), 1,2-DiLinoleyloxy-N,N-dimethylaminopropane (DLinDMA), 1,2-Dilinolenyloxy-N,N-dimethylaminopropane (DLenDMA), 1,2-Dilinoleylcarbamoyloxy-3-dimethylaminopropane (DLin-C-DAP), 1,2-Dilinoleyoxy-3-(dimethylamino)acetoxypropane (DLin-DAC), 1,2-Dilinoleyoxy-3-morpholinopropane (DLin-MA), 1,2-Dilinoleoyl-3-dimethylaminopropane (DLinDAP), 1,2-Dilinoleylthio-3-dimethylaminopropane (DLin-S-DMA), 1-Linoleoyl-2-linoleyloxy-3-dimethylaminopropane (DLin-2-DMAP), 1,2-Dilinoleyloxy-3-trimethylaminopropane chloride salt (DLin-TMA.Cl), 1,2-Dilinoleoyl-3-trimethylaminopropane chloride salt (DLin-TAP.Cl), 1,2-Dilinoleyloxy-3-(N-methylpiperazino)propane (DLin-MPZ), or 3-(N,N-Dilinoleylamino)-1,2-propanediol (DLinAP), 3-(N,N-Dioleylamino)-1,2-propanedio (DOAP), 1,2-Dilinoleyloxo-3-(2-N,N-dimethylamino)ethoxypropane (DLin-EG-DMA), 1,2-Dilinolenyloxy-N,N-dimethylaminopropane (DLinDMA), 2,2-Dilinoleyl-4-dimethylaminomethyl-[1,3]-dioxolane (DLin-K-DMA) or analogs thereof, (3aR,5s,6aS)—N,N-dimethyl-2,2-di((9Z,12Z)-octadeca-9,12-dienyl)tetrahydro-3aH-cyclopenta[d][1,3]dioxol-5-amine (ALNY-100), (6Z,9Z,28Z,31Z)-heptatriaconta-6,9,28,31-tetraen-19-yl 4-(dimethylamino)butanoate (MC3), or a mixture thereof.

[0200] Other cationic lipids, which carry a net positive charge at about physiological pH, in addition to those specifically described above, may also be included in lipid particles of the invention. Such cationic lipids include, but are not limited to, N,N-dioleyl-N,N-dimethylammonium chloride (“DODAC”); N-(2,3-dioleyloxy)propyl-N,N—N-triethylammonium chloride (“DOTMA”); N,N-distearyl-N,N-dimethylammonium bromide (“DDAB”); N-(2,3-dioleoyloxy)propyl)-N,N,N-trimethylammonium chloride (“DOTAP”); 1,2-Dioleyloxy-3-trimethylaminopropane chloride salt (“DOTAP.Cl”); 3β-(N—(N′,N′-dimethylaminoethane)-carbamoyl)cholesterol (“DC-Chol”), N-(1-(2,3-dioleyloxy)propyl)-N-2-(sperminecarboxamido)ethyl)-N,N-dimethylammonium trifluoracetate (“DOSPA”), dioctadecylamidoglycyl carboxyspermine (“DOGS”), 1,2-dileoyl-sn-3-phosphoethanolamine (“DOPE”), 1,2-dioleoyl-3-dimethylammonium propane (“DODAP”), N, N-dimethyl-2,3-dioleyloxy)propylamine (“DODMA”), and N-(1,2-dimyristyloxyprop-3-yl)-N,N-dimethyl-N-hydroxyethyl ammonium bromide (“DMRIE”). Additionally, a number of commercial preparations of cationic lipids can be used, such as, e.g., LIPOFECTIN (including DOTMA and DOPE, available from GIBCO/BRL), and LIPOFECTAMINE (comprising DOSPA and DOPE, available from GIBCO/BRL). In particular embodiments, a cationic lipid is an amino lipid.

[0201] As used herein, the term “amino lipid” is meant to include those lipids having one or two fatty acid or fatty alkyl chains and an amino head group (including an alkylamino or dialkylamino group) that may be protonated to form a cationic lipid at physiological pH.

[0202] Other amino lipids would include those having alternative fatty acid groups and other dialkylamino groups, including those in which the alkyl substituents are different (e.g., N-ethyl-N-methylamino-, N-propyl-N-ethylamino- and the like). For those embodiments in which R¹¹ and R¹² are both long chain alkyl or acyl groups, they can be the same or different. In general, amino lipids having less saturated acyl chains are more easily sized, particularly when the complexes must be sized below about 0.3 microns, for purposes of filter sterilization. Amino lipids containing unsaturated fatty acids with carbon chain lengths in the range of C₁₄ to C₂₂ are preferred. Other scaffolds can also be used to separate the amino group and the fatty acid or fatty alkyl portion of the amino lipid. Suitable scaffolds are known to those of skill in the art.

[0203] In certain embodiments, amino or cationic lipids of the invention have at least one protonatable or deprotonatable group, such that the lipid is positively charged at a pH at or below physiological pH (e.g. pH 7.4), and neutral at a second pH, preferably at or above physiological pH. It will, of course, be understood that the addition or removal of protons as a function of pH is an equilibrium process, and that the reference to a charged or a neutral lipid refers to the nature of the predominant species and does not require that all of the lipid be present in the charged or neutral form. Lipids that have more than one protonatable or deprotonatable group, or which are zwiterrionic, are not excluded from use in the invention.

[0204] In certain embodiments, protonatable lipids according to the invention have a pKa of the protonatable group in the range of about 4 to about 11. Most preferred is pKa of about 4 to about 7, because these lipids will be cationic at a lower pH formulation stage, while particles will be largely (though not completely) surface neutralized at physiological pH around pH 7.4. One of the benefits of this pKa is that at least some nucleic acid associated with the outside surface of the particle will lose its electrostatic interaction at physiological pH and be removed by simple dialysis; thus greatly reducing the particle's susceptibility to clearance.

[0205] One example of a cationic lipid is 1,2-Dilinolenyloxy-N,N-dimethylaminopropane (DLinDMA). Synthesis and preparation of nucleic acid-lipid particles including DLinDMA is described in International application number PCT/CA2009/00496, filed Apr. 15, 2009.

[0206] In one embodiment, the cationic lipid XTC (2,2-Dilinoleyl-4-dimethylaminoethyl-[1,3]-dioxolane) is used to prepare nucleic acid-lipid particles. Synthesis of XTC is described in U.S. provisional patent application No. 61/107,998 filed on Oct. 23, 2008, which is herein incorporated by reference.

[0207] In one aspect, the cationic lipids have the structure

[chemical structure]

[0208] and salts or isomers thereof, wherein R₁ and R₂ are each independently for each occurrence optionally substituted C₁₀-C₃₀ alkyl, optionally substituted C₁₀-C₃₀ alkenyl, optionally substituted C₁₀-C₃₀ alkynyl, optionally substituted C₁₀-C₃₀ acyl, or -linker-ligand; R₃ is H, optionally substituted C₁-C₁₀ alkyl, optionally substituted C₂-C₁₀ alkenyl, optionally substituted C₂-C₁₀ alkynyl, alkylhetrocycle, alkylphosphate, alkylphosphorothioate, alkylphosphorodithioate, alkylphosphonates, alkylamines, hydroxyalkyls, ω-aminoalkyls, ω-(substituted)aminoalkyls, ω-phosphoalkyls, ω-thiophosphoalkyls, optionally substituted polyethylene glycol (PEG, mw 100-40K), optionally substituted mPEG (mw 120-40K), heteroaryl, heterocycle, or linker-ligand; and E is C(O)O or OC(O). Synthesis and use of this lipid family is described in WO 2010/054401 (PCTUS2009/063927 filed on Nov. 10, 2009. The cationic lipid MC3 is one embodiment of this family of cationic lipids.

[0209] In another embodiment, the cationic lipid MC3 ((6Z,9Z,28Z,31Z)-heptatriaconta-6,9,28,31-tetraen-19-yl 4-(dimethylamino)butanoate), (e.g., DLin-M-C3-DMA) is used to prepare nucleic acid-lipid particles. Synthesis of MC3 and MC3 comprising formulations are described, e.g., in U.S. Provisional Ser. No. 61/244,834, filed Sep. 22, 2009, and U.S. Provisional Ser. No. 61/185,800, filed Jun. 10, 2009, and U.S. patent application Ser. No. 12/813,448 filed on Jun. 10, 2010, which are hereby incorporated by reference.

[0210] In another embodiment, the cationic lipid ALNY-100 ((3aR,5s,6aS)—N,N-dimethyl-2,2-di((9Z,12Z)-octadeca-9,12-dienyl)tetrahydro-3aH-cyclopenta[d][1,3]dioxol-5-amine) is used to prepare nucleic acid-lipid particles. Synthesis of ALNY-100 is described in International patent application number PCT/US09/63933 filed on Nov. 10, 2009, which is herein incorporated by reference.

[0211] FIG. 28 illustrates the structures of ALNY-100 and MC3.

[0212] The cationic lipid may comprise from about 20 mol % to about 70 mol % or about 45-65 mol % or about 10, 20, 30, 40, 50, 60, or 70 mol % of the total lipid present in the particle.

[0213] Non-Cationic Lipids

[0214] The nucleic acid-lipid particles of the invention can include a non-cationic lipid. The non-cationic lipid may be an anionic lipid or a neutral lipid. Examples include but not limited to, distearoylphosphatidylcholine (DSPC), dioleoylphosphatidylcholine (DOPC), dipalmitoylphosphatidylcholine (DPPC), dioleoylphosphatidylglycerol (DOPG), dipalmitoylphosphatidylglycerol (DPPG), dioleoyl-phosphatidylethanolamine (DOPE), palmitoyloleoylphosphatidylcholine (POPC), palmitoyloleoylphosphatidylethanolamine (POPE), dioleoyl-phosphatidylethanolamine 4-(N-maleimidomethyl)-cyclohexane-1-carboxylate (DOPE-mal), dipalmitoyl phosphatidyl ethanolamine (DPPE), dimyristoylphosphoethanolamine (DMPE), distearoyl-phosphatidyl-ethanolamine (DSPE), 16-O-monomethyl PE, 16-O-dimethyl PE, 18-1-trans PE, 1-stearoyl-2-oleoyl-phosphatidyethanolamine (SOPE), cholesterol, or a mixture thereof.

[0215] Anionic lipids suitable for use in lipid particles of the invention include, but are not limited to, phosphatidylglycerol, cardiolipin, diacylphosphatidylserine, diacylphosphatidic acid, N-dodecanoyl phosphatidylethanoloamine, N-succinyl phosphatidylethanolamine, N-glutaryl phosphatidylethanolamine, lysylphosphatidylglycerol, and other anionic modifying groups joined to neutral lipids.

[0216] Neutral lipids, when present in the lipid particle, can be any of a number of lipid species which exist either in an uncharged or neutral zwitterionic form at physiological pH. Such lipids include, for example diacylphosphatidylcholine, diacylphosphatidylethanolamine, ceramide, sphingomyelin, dihydrosphingomyelin, cephalin, and cerebrosides. The selection of neutral lipids for use in the particles described herein is generally guided by consideration of, e.g., liposome size and stability of the liposomes in the bloodstream. Preferably, the neutral lipid component is a lipid having two acyl groups, (i.e., diacylphosphatidylcholine and diacylphosphatidylethanolamine). Lipids having a variety of acyl chain groups of varying chain length and degree of saturation are available or may be isolated or synthesized by well-known techniques. In one group of embodiments, lipids containing saturated fatty acids with carbon chain lengths in the range of C₁₄ to C₂₂ are preferred. In another group of embodiments, lipids with mono- or di-unsaturated fatty acids with carbon chain lengths in the range of C₁₄ to C₂₂ are used. Additionally, lipids having mixtures of saturated and unsaturated fatty acid chains can be used. Preferably, the neutral lipids used in the invention are DOPE, DSPC, POPC, or any related phosphatidylcholine. The neutral lipids useful in the invention may also be composed of sphingomyelin, dihydrosphingomyeline, or phospholipids with other head groups, such as serine and inositol.

[0217] In one embodiment the non-cationic lipid is distearoylphosphatidylcholine (DSPC). In another embodiment the non-cationic lipid is dipalmitoylphosphatidylcholine (DPPC).

[0218] The non-cationic lipid may be from about 5 mol % to about 90 mol %, about 5 mol % to about 10 mol %, about 10 mol %, or about 58 mol % if cholesterol is included, of the total lipid present in the particle.

[0219] Conjugated Lipids

[0220] Conjugated lipids can be used in nucleic acid-lipid particle to prevent aggregation, including polyethylene glycol (PEG)-modified lipids, monosialoganglioside Gml, and polyamide oligomers (“PAO”) such as (described in U.S. Pat. No. 6,320,017). Other compounds with uncharged, hydrophilic, steric-barrier moieties, which prevent aggregation during formulation, like PEG, Gml or ATTA, can also be coupled to lipids for use as in the methods and compositions of the invention. ATTA-lipids are described, e.g., in U.S. Pat. No. 6,320,017, and PEG-lipid conjugates are described, e.g., in U.S. Pat. Nos. 5,820,873, 5,534,499 and 5,885,613. Typically, the concentration of the lipid component selected to reduce aggregation is about 1 to 15% (by mole percent of lipids).

[0221] Specific examples of PEG-modified lipids (or lipid-polyoxyethylene conjugates) that are useful in the invention can have a variety of “anchoring” lipid portions to secure the PEG portion to the surface of the lipid vesicle. Examples of suitable PEG-modified lipids include PEG-modified phosphatidylethanolamine and phosphatidic acid, PEG-ceramide conjugates (e.g., PEG-CerC14 or PEG-CerC20) which are described in co-pending U.S. Ser. No. 08/486,214, incorporated herein by reference, PEG-modified dialkylamines and PEG-modified 1,2-diacyloxypropan-3-amines. Particularly preferred are PEG-modified diacylglycerols and dialkylglycerols.

[0222] In embodiments where a sterically-large moiety such as PEG or ATTA are conjugated to a lipid anchor, the selection of the lipid anchor depends on what type of association the conjugate is to have with the lipid particle. It is well known that mePEG (mw2000)-diastearoylphosphatidylethanolamine (PEG-DSPE) will remain associated with a liposome until the particle is cleared from the circulation, possibly a matter of days. Other conjugates, such as PEG-CerC20 have similar staying capacity. PEG-CerC14, however, rapidly exchanges out of the formulation upon exposure to serum, with a T_{1/2} less than 60 minutes in some assays. As illustrated in U.S. patent application Ser. No. 08/486,214, at least three characteristics influence the rate of exchange: length of acyl chain, saturation of acyl chain, and size of the steric-barrier head group. Compounds having suitable variations of these features may be useful for the invention. For some therapeutic applications, it may be preferable for the PEG-modified lipid to be rapidly lost from the nucleic acid-lipid particle in vivo and hence the PEG-modified lipid will possess relatively short lipid anchors. In other therapeutic applications, it may be preferable for the nucleic acid-lipid particle to exhibit a longer plasma circulation lifetime and hence the PEG-modified lipid will possess relatively longer lipid anchors. Exemplary lipid anchors include those having lengths of from about C₁₄ to about C₂₂, preferably from about C₁₄ to about C₁₆. In some embodiments, a PEG moiety, for example an mPEG-NH₂, has a size of about 1000, 2000, 5000, 10,000, 15,000 or 20,000 Daltons.

[0223] It should be noted that aggregation preventing compounds do not necessarily require lipid conjugation to function properly. Free PEG or free ATTA in solution may be sufficient to prevent aggregation. If the particles are stable after formulation, the PEG or ATTA can be dialyzed away before administration to a subject.

[0224] The conjugated lipid that inhibits aggregation of particles may be, for example, a polyethyleneglycol (PEG)-lipid including, without limitation, a PEG-diacylglycerol (DAG), a PEG-dialkyloxypropyl (DAA), a PEG-phospholipid, a PEG-ceramide (Cer), or a mixture thereof. The PEG-DAA conjugate may be, for example, a PEG-dilauryloxypropyl (Ci₂), a PEG-dimyristyloxypropyl (Ci₄), a PEG-dipalmityloxypropyl (Ci₆), or a PEG-distearyloxypropyl (Ci₈). Additional conjugated lipids include polyethylene glycol-didimyristoyl glycerol (C14-PEG or PEG-C14, where PEG has an average molecular weight of 2000 Da) (PEG-DMG); (R)-2,3-bis(octadecyloxy)propyl1-(methoxy poly(ethylene glycol)2000)propylcarbamate) (PEG-DSG); PEG-carbamoyl-1,2-dimyristyloxypropylamine, in which PEG has an average molecular weight of 2000 Da (PEG-cDMA); N-Acetylgalactosamine-((R)-2,3-bis(octadecyloxy)propyl1-(methoxy poly(ethylene glycol)2000)propylcarbamate)) (GalNAc-PEG-DSG); and polyethylene glycol-dipalmitoylglycerol (PEG-DPG).

[0225] In one embodiment the conjugated lipid is PEG-DMG. In another embodiment the conjugated lipid is PEG-cDMA. In still another embodiment the conjugated lipid is PEG-DPG. Alternatively the conjugated lipid is GalNAc-PEG-DSG.

[0226] The conjugated lipid that prevents aggregation of particles may be from 0 mol % to about 20 mol % or about 0.5 to about 5.0 mol % or about 2 mol % of the total lipid present in the particle.

[0227] The sterol component of the lipid mixture, when present, can be any of those sterols conventionally used in the field of liposome, lipid vesicle or lipid particle preparation. A preferred sterol is cholesterol.

[0228] In some embodiments, the nucleic acid-lipid particle further includes a sterol, e.g., a cholesterol at, e.g., about 10 mol % to about 60 mol % or about 25 to about 40 mol % or about 48 mol % of the total lipid present in the particle.

[0229] Lipoproteins

[0230] In one embodiment, the formulations of the invention further comprise an apolipoprotein. As used herein, the term “apolipoprotein” or “lipoprotein” refers to apolipoproteins known to those of skill in the art and variants and fragments thereof and to apolipoprotein agonists, analogues or fragments thereof described below.

[0231] Suitable apolipoproteins include, but are not limited to, ApoA-I, ApoA-II, ApoA-IV, ApoA-V and ApoE, and active polymorphic forms, isoforms, variants and mutants as well as fragments or truncated forms thereof. In certain embodiments, the apolipoprotein is a thiol containing apolipoprotein. “Thiol containing apolipoprotein” refers to an apolipoprotein, variant, fragment or isoform that contains at least one cysteine residue. The most common thiol containing apolipoproteins are ApoA-I Milano (ApoA-I_{M}) and ApoA-I Paris (ApoA-Ip) which contain one cysteine residue (Jia et al., 2002, Biochem. Biophys. Res. Comm. 297: 206-13; Bielicki and Oda, 2002, Biochemistry 41: 2089-96). ApoA-II, ApoE2 and ApoE3 are also thiol containing apolipoproteins. Isolated ApoE and/or active fragments and polypeptide analogues thereof, including recombinantly produced forms thereof, are described in U.S. Pat. Nos. 5,672,685; 5,525,472; 5,473,039; 5,182,364; 5,177,189; 5,168,045; 5,116,739; the disclosures of which are herein incorporated by reference. ApoE3 is disclosed in Weisgraber, et al., “Human E apoprotein heterogeneity: cysteine-arginine interchanges in the amino acid sequence of the apo-E isoforms,” J. Biol. Chem. (1981) 256: 9077-9083; and Rall, et al., “Structural basis for receptor binding heterogeneity of apolipoprotein E from type III hyperlipoproteinemic subjects,” Proc. Nat. Acad. Sci. (1982) 79: 4696-4700. (See also GenBank accession number K00396.)

[0232] In certain embodiments, the apolipoprotein can be in its mature form, in its preproapolipoprotein form or in its proapolipoprotein form. Homo- and heterodimers (where feasible) of pro- and mature ApoA-I (Duverger et al., 1996, Arterioscler. Thromb. Vasc. Biol. 16(12):1424-29), ApoA-I Milano (Klon et al., 2000, Biophys. J. 79:(3)1679-87; Franceschini et al., 1985, J. Biol. Chem. 260: 1632-35), ApoA-I Paris (Daum et al., 1999, J. Mol. Med. 77:614-22), ApoA-II (Shelness et al., 1985, J. Biol. Chem. 260(14):8637-46; Shelness et al., 1984, J. Biol. Chem. 259(15):9929-35), ApoA-IV (Duverger et al., 1991, Euro. J. Biochem. 201(2):373-83), and ApoE (McLean et al., 1983, J. Biol. Chem. 258(14):8993-9000) can also be utilized within the scope of the invention.

[0233] In certain embodiments, the apolipoprotein can be a fragment, variant or isoform of the apolipoprotein. The term “fragment” refers to any apolipoprotein having an amino acid sequence shorter than that of a native apolipoprotein and which fragment retains the activity of native apolipoprotein, including lipid binding properties. By “variant” is meant substitutions or alterations in the amino acid sequences of the apolipoprotein, which substitutions or alterations, e.g., additions and deletions of amino acid residues, do not abolish the activity of native apolipoprotein, including lipid binding properties. Thus, a variant can comprise a protein or peptide having a substantially identical amino acid sequence to a native apolipoprotein provided herein in which one or more amino acid residues have been conservatively substituted with chemically similar amino acids. Examples of conservative substitutions include the substitution of at least one hydrophobic residue such as isoleucine, valine, leucine or methionine for another. Likewise, the present invention contemplates, for example, the substitution of at least one hydrophilic residue such as, for example, between arginine and lysine, between glutamine and asparagine, and between glycine and serine (see U.S. Pat. Nos. 6,004,925, 6,037,323 and 6,046,166). The term “isoform” refers to a protein having the same, greater or partial function and similar, identical or partial sequence, and may or may not be the product of the same gene and usually tissue specific (see Weisgraber 1990, J. Lipid Res. 31(8):1503-11; Hixson and Powers 1991, J. Lipid Res. 32(9):1529-35; Lackner et al., 1985, J. Biol. Chem. 260(2):703-6; Hoeg et al., 1986, J. Biol. Chem. 261(9):3911-4; Gordon et al., 1984, J. Biol. Chem. 259(1):468-74; Powell et al., 1987, Cell 50(6):831-40; Aviram et al., 1998, Arterioscler. Thromb. Vase. Biol. 18(10):1617-24; Aviram et al., 1998, J. Clin. Invest. 101(8):1581-90; Billecke et al., 2000, Drug Metab. Dispos. 28(11):1335-42; Draganov et al., 2000, J. Biol. Chem. 275(43):33435-42; Steinmetz and Utermann 1985, J. Biol. Chem. 260(4):2258-64; Widler et al., 1980, J. Biol. Chem. 255(21):10464-71; Dyer et al., 1995, J. Lipid Res. 36(1):80-8; Sacre et al., 2003, FEBS Lett. 540(1-3):181-7; Weers, et al., 2003, Biophys. Chem. 100(1-3):481-92; Gong et al., 2002, J. Biol. Chem. 277(33):29919-26; Ohta et al., 1984, J. Biol. Chem. 259(23):14888-93 and U.S. Pat. No. 6,372,886).

[0234] In certain embodiments, the methods and compositions of the present invention include the use of a chimeric construction of an apolipoprotein. For example, a chimeric construction of an apolipoprotein can be comprised of an apolipoprotein domain with high lipid binding capacity associated with an apolipoprotein domain containing ischemia reperfusion protective properties. A chimeric construction of an apolipoprotein can be a construction that includes separate regions within an apolipoprotein (i.e., homologous construction) or a chimeric construction can be a construction that includes separate regions between different apolipoproteins (i.e., heterologous constructions). Compositions comprising a chimeric construction can also include segments that are apolipoprotein variants or segments designed to have a specific character (e.g., lipid binding, receptor binding, enzymatic, enzyme activating, antioxidant or reduction-oxidation property) (see Weisgraber 1990, J. Lipid Res. 31(8):1503-11; Hixson and Powers 1991, J. Lipid Res. 32(9):1529-35; Lackner et al., 1985, J. Biol. Chem. 260(2):703-6; Hoeg et al., 1986, J. Biol. Chem. 261(9):3911-4; Gordon et al., 1984, J. Biol. Chem. 259(1):468-74; Powell et al., 1987, Cell 50(6):831-40; Aviram et al., 1998, Arterioscler. Thromb. Vasc. Biol. 18(10):1617-24; Aviram et al., 1998, J. Clin. Invest. 101(8):1581-90; Billecke et al., 2000, Drug Metab. Dispos. 28(11):1335-42; Draganov et al., 2000, J. Biol. Chem. 275(43):33435-42; Steinmetz and Utermann 1985, J. Biol. Chem. 260(4):2258-64; Widler et al., 1980, J. Biol. Chem. 255(21):10464-71; Dyer et al., 1995, J. Lipid Res. 36(1):80-8; Sorenson et al., 1999, Arterioscler. Thromb. Vasc. Biol. 19(9):2214-25; Palgunachari 1996, Arterioscler. Throb. Vasc. Biol. 16(2):328-38: Thurberg et al., J. Biol. Chem. 271(11):6062-70; Dyer 1991, J. Biol. Chem. 266(23):150009-15; Hill 1998, J. Biol. Chem. 273(47):30979-84).

[0235] Apolipoproteins utilized in the invention also include recombinant, synthetic, semi-synthetic or purified apolipoproteins. Methods for obtaining apolipoproteins or equivalents thereof, utilized by the invention are well-known in the art. For example, apolipoproteins can be separated from plasma or natural products by, for example, density gradient centrifugation or immunoaffinity chromatography, or produced synthetically, semi-synthetically or using recombinant DNA techniques known to those of the art (see, e.g., Mulugeta et al., 1998, J. Chromatogr. 798(1-2): 83-90; Chung et al., 1980, J. Lipid Res. 21(3):284-91; Cheung et al., 1987, J. Lipid Res. 28(8):913-29; Persson, et al., 1998, J. Chromatogr. 711:97-109; U.S. Pat. Nos. 5,059,528, 5,834,596, 5,876,968 and 5,721,114; and PCT Publications WO 86/04920 and WO 87/02062).

[0236] Apolipoproteins utilized in the invention further include apolipoprotein agonists such as peptides and peptide analogues that mimic the activity of ApoA-I, ApoA-I Milano (ApoA-I_{M}), ApoA-I Paris (ApoA-I_{P}), ApoA-II, ApoA-IV, and ApoE. For example, the apolipoprotein can be any of those described in U.S. Pat. Nos. 6,004,925, 6,037,323, 6,046,166, and 5,840,688, the contents of which are incorporated herein by reference in their entireties.

[0237] Apolipoprotein agonist peptides or peptide analogues can be synthesized or manufactured using any technique for peptide synthesis known in the art including, e.g., the techniques described in U.S. Pat. Nos. 6,004,925, 6,037,323 and 6,046,166. For example, the peptides may be prepared using the solid-phase synthetic technique initially described by Merrifield (1963, J. Am. Chem. Soc. 85:2149-2154). Other peptide synthesis techniques may be found in Bodanszky et al., Peptide Synthesis, John Wiley & Sons, 2d Ed., (1976) and other references readily available to those skilled in the art. A summary of polypeptide synthesis techniques can be found in Stuart and Young, Solid Phase Peptide. Synthesis, Pierce Chemical Company, Rockford, Ill., (1984). Peptides may also be synthesized by solution methods as described in The Proteins, Vol. II, 3d Ed., Neurath et al., Eds., p. 105-237, Academic Press, New York, N.Y. (1976). Appropriate protective groups for use in different peptide syntheses are described in the above-mentioned texts as well as in McOmie, Protective Groups in Organic Chemistry, Plenum Press, New York, N.Y. (1973). The peptides of the present invention might also be prepared by chemical or enzymatic cleavage from larger portions of, for example, apolipoprotein A-I.

[0238] In certain embodiments, the apolipoprotein can be a mixture of apolipoproteins. In one embodiment, the apolipoprotein can be a homogeneous mixture, that is, a single type of apolipoprotein. In another embodiment, the apolipoprotein can be a heterogeneous mixture of apolipoproteins, that is, a mixture of two or more different apolipoproteins. Embodiments of heterogeneous mixtures of apolipoproteins can comprise, for example, a mixture of an apolipoprotein from an animal source and an apolipoprotein from a semi-synthetic source. In certain embodiments, a heterogeneous mixture can comprise, for example, a mixture of ApoA-I and ApoA-I Milano. In certain embodiments, a heterogeneous mixture can comprise, for example, a mixture of ApoA-I Milano and ApoA-I Paris. Suitable mixtures for use in the methods and compositions of the invention will be apparent to one of skill in the art.

[0239] If the apolipoprotein is obtained from natural sources, it can be obtained from a plant or animal source. If the apolipoprotein is obtained from an animal source, the apolipoprotein can be from any species. In certain embodiments, the apolipoprotien can be obtained from an animal source. In certain embodiments, the apolipoprotein can be obtained from a human source. In preferred embodiments of the invention, the apolipoprotein is derived from the same species as the individual to which the apolipoprotein is administered.

[0240] Other Components

[0241] In numerous embodiments, amphipathic lipids are included in lipid particles of the invention. “Amphipathic lipids” refer to any suitable material, wherein the hydrophobic portion of the lipid material orients into a hydrophobic phase, while the hydrophilic portion orients toward the aqueous phase. Such compounds include, but are not limited to, phospholipids, aminolipids, and sphingolipids. Representative phospholipids include sphingomyelin, phosphatidylcholine, phosphatidylethanolamine, phosphatidylserine, phosphatidylinositol, phosphatidic acid, palmitoyloleoyl phosphatdylcholine, lysophosphatidylcholine, lysophosphatidylethanolamine, dipalmitoylphosphatidylcholine, dioleoylphosphatidylcholine, distearoylphosphatidylcholine, or dilinoleylphosphatidylcholine. Other phosphorus-lacking compounds, such as sphingolipids, glycosphingolipid families, diacylglycerols, and β-acyloxyacids, can also be used. Additionally, such amphipathic lipids can be readily mixed with other lipids, such as triglycerides and sterols.

[0242] Also suitable for inclusion in the lipid particles of the invention are programmable fusion lipids. Such lipid particles have little tendency to fuse with cell membranes and deliver their payload until a given signal event occurs. This allows the lipid particle to distribute more evenly after injection into an organism or disease site before it starts fusing with cells. The signal event can be, for example, a change in pH, temperature, ionic environment, or time. In the latter case, a fusion delaying or “cloaking” component, such as an ATTA-lipid conjugate or a PEG-lipid conjugate, can simply exchange out of the lipid particle membrane over time. Exemplary lipid anchors include those having lengths of from about C₁₄ to about C₂₂, preferably from about C₁₄ to about C₁₆. In some embodiments, a PEG moiety, for example an mPEG-NH₂, has a size of about 1000, 2000, 5000, 10,000, 15,000 or 20,000 Daltons.

[0243] A lipid particle conjugated to a nucleic acid agent can also include a targeting moiety, e.g., a targeting moiety that is specific to a cell type or tissue. Targeting of lipid particles using a variety of targeting moieties, such as ligands, cell surface receptors, glycoproteins, vitamins (e.g., riboflavin) and monoclonal antibodies, has been previously described (see, e.g., U.S. Pat. Nos. 4,957,773 and 4,603,044). The targeting moieties can include the entire protein or fragments thereof. Targeting mechanisms generally require that the targeting agents be positioned on the surface of the lipid particle in such a manner that the targeting moiety is available for interaction with the target, for example, a cell surface receptor. A variety of different targeting agents and methods are known and available in the art, including those described, e.g., in Sapra, P. and Allen, T M, Prog. Lipid Res. 42(5):439-62 (2003); and Abra, R M et al., J. Liposome Res. 12:1-3, (2002).

[0244] The use of lipid particles, i.e., liposomes, with a surface coating of hydrophilic polymer chains, such as polyethylene glycol (PEG) chains, for targeting has been proposed (Allen, et al., Biochimica et Biophysica Acta 1237: 99-108 (1995); DeFrees, et al., Journal of the American Chemistry Society 118: 6101-6104 (1996); Blume, et al., Biochimica et Biophysica Acta 1149: 180-184 (1993); Klibanov, et al., Journal of Liposome Research 2: 321-334 (1992); U.S. Pat. No. 5,013,556; Zalipsky, Bioconjugate Chemistry 4: 296-299 (1993); Zalipsky, FEBS Letters 353: 71-74 (1994); Zalipsky, in Stealth Liposomes Chapter 9 (Lasic and Martin, Eds) CRC Press, Boca Raton Fla. (1995). In one approach, a ligand, such as an antibody, for targeting the lipid particle is linked to the polar head group of lipids forming the lipid particle. In another approach, the targeting ligand is attached to the distal ends of the PEG chains forming the hydrophilic polymer coating (Klibanov, et al., Journal of Liposome Research 2: 321-334 (1992); Kirpotin et al., FEBS Letters 388: 115-118 (1996)).

[0245] Standard methods for coupling the target agents can be used. For example, phosphatidylethanolamine, which can be activated for attachment of target agents, or derivatized lipophilic compounds, such as lipid-derivatized bleomycin, can be used. Antibody-targeted liposomes can be constructed using, for instance, liposomes that incorporate protein A (see, Renneisen, et al., J. Bio. Chem., 265:16337-16342 (1990) and Leonetti, et al., Proc. Natl. Acad. Sci. (USA), 87:2448-2451 (1990). Other examples of antibody conjugation are disclosed in U.S. Pat. No. 6,027,726, the teachings of which are incorporated herein by reference. Examples of targeting moieties can also include other proteins, specific to cellular components, including antigens associated with neoplasms or tumors. Proteins used as targeting moieties can be attached to the liposomes via covalent bonds (see, Heath, Covalent Attachment of Proteins to Liposomes, 149 Methods in Enzymology 111-119 (Academic Press, Inc. 1987)). Other targeting methods include the biotin-avidin system.

[0246] Production of Nucleic Acid-Lipid Particles

[0247] In one embodiment, the nucleic acid-lipid particle formulations of the invention are produced via an extrusion method or an in-line mixing method.

[0248] The extrusion method (also referred to as preformed method or batch process) is a method where the empty liposomes (i.e. no nucleic acid) are prepared first, followed by the addition of nucleic acid to the empty liposome. Extrusion of liposome compositions through a small-pore polycarbonate membrane or an asymmetric ceramic membrane results in a relatively well-defined size distribution. Typically, the suspension is cycled through the membrane one or more times until the desired liposome complex size distribution is achieved. The liposomes may be extruded through successively smaller-pore membranes, to achieve a gradual reduction in liposome size. In some instances, the lipid-nucleic acid compositions which are formed can be used without any sizing. These methods are disclosed in the U.S. Pat. No. 5,008,050; U.S. Pat. No. 4,927,637; U.S. Pat. No. 4,737,323; Biochim Biophys Acta. 1979 Oct. 19; 557(1):9-23; Biochim Biophys Acta. 1980 Oct. 2; 601(3):559-7; Biochim Biophys Acta. 1986 Jun. 13; 858(1):161-8; and Biochim. Biophys. Acta 1985 812, 55-65, which are hereby incorporated by reference in their entirety.

[0249] The in-line mixing method is a method wherein both the lipids and the nucleic acid are added in parallel into a mixing chamber. The mixing chamber can be a simple T-connector or any other mixing chamber that is known to one skill in the art. These methods are disclosed in U.S. Pat. No. 6,534,018 and U.S. Pat. No. 6,855,277; US publication 2007/0042031 and Pharmaceuticals Research, Vol. 22, No. 3, March 2005, p. 362-372, which are hereby incorporated by reference in their entirety.

[0250] It is further understood that the formulations of the invention can be prepared by any methods known to one of ordinary skill in the art.

[0251] Characterization of Nucleic Acid-Lipid Particles

[0252] Formulations prepared by either the standard or extrusion-free method can be characterized in similar manners. For example, formulations are typically characterized by visual inspection. They should be whitish translucent solutions free from aggregates or sediment. Particle size and particle size distribution of lipid-nanoparticles can be measured by light scattering using, for example, a Malvern Zetasizer Nano ZS (Malvern, USA). Particles should be about 20-300 nm, such as 40-100 nm in size. The particle size distribution should be unimodal. The total siRNA concentration in the formulation, as well as the entrapped fraction, is estimated using a dye exclusion assay. A sample of the formulated siRNA can be incubated with an RNA-binding dye, such as Ribogreen (Molecular Probes) in the presence or absence of a formulation disrupting surfactant, e.g., 0.5% Triton-X100. The total siRNA in the formulation can be determined by the signal from the sample containing the surfactant, relative to a standard curve. The entrapped fraction is determined by subtracting the “free” siRNA content (as measured by the signal in the absence of surfactant) from the total siRNA content. Percent entrapped siRNA is typically >85%. In one embodiment, the formulations of the invention are entrapped by at least 75%, at least 80% or at least 90%.

[0253] For nucleic acid-lipid particle formulations, the particle size is at least 30 nm, at least 40 nm, at least 50 nm, at least 60 nm, at least 70 nm, at least 80 nm, at least 90 nm, at least 100 nm, at least 110 nm, and at least 120 nm. The suitable range is typically about at least 50 nm to about at least 110 nm, about at least 60 nm to about at least 100 nm, or about at least 80 nm to about at least 90 nm.

[0254] Formulations of Nucleic Acid-Lipid Particles

[0255] LNP01

[0256] One example of synthesis of a nucleic acid-lipid particle is as follows. Nucleic acid-lipid particles are synthesized using the lipidoid ND98.4HCl (MW 1487) (Formula 1), Cholesterol (Sigma-Aldrich), and PEG-Ceramide C16 (Avanti Polar Lipids). This nucleic acid-lipid particle is sometimes referred to as a LNP01 particle. Stock solutions of each in ethanol can be prepared as follows: ND98, 133 mg/ml; Cholesterol, 25 mg/ml, PEG-Ceramide C16, 100 mg/ml. The ND98, Cholesterol, and PEG-Ceramide C16 stock solutions can then be combined in a, e.g., 42:48:10 molar ratio. The combined lipid solution can be mixed with aqueous siRNA (e.g., in sodium acetate pH 5) such that the final ethanol concentration is about 35-45% and the final sodium acetate concentration is about 100-300 mM. Lipid-siRNA nanoparticles typically form spontaneously upon mixing. Depending on the desired particle size distribution, the resultant nanoparticle mixture can be extruded through a polycarbonate membrane (e.g., 100 nm cut-off) using, for example, a thermobarrel extruder, such as Lipex Extruder (Northern Lipids, Inc). In some cases, the extrusion step can be omitted. Ethanol removal and simultaneous buffer exchange can be accomplished by, for example, dialysis or tangential flow filtration. Buffer can be exchanged with, for example, phosphate buffered saline (PBS) at about pH 7, e.g., about pH 6.9, about pH 7.0, about pH 7.1, about pH 7.2, about pH 7.3, or about pH 7.4.

[chemical structure]

[0257] LNP01 formulations are described, e.g., in International Application Publication No. WO 2008/042973, which is hereby incorporated by reference.

[0258] Additional exemplary nucleic acid-lipid particle formulations are described in the following table. It is to be understood that the name of the nucleic acid-lipid particle in the table is not meant to be limiting. For example, as used herein, the term SNALP refers to formulations that include the cationic lipid DLinDMA.

| | cationic |
|---|---|
| | lipid/non-cationic lipid/cholesterol/PEG-lipid conjugate |
| | mol % ratio |
| Name | Lipid:siRNA ratio |
| SNALP | DLinDMA/DPPC/Cholesterol/PEG-cDMA |
| | (57.1/7.1/34.4/1.4) |
| | lipid:siRNA ~7:1 |
| LNP-S-X | XTC/DPPC/Cholesterol/PEG-cDMA |
| | 57.1/7.1/34.4/1.4 |
| | lipid:siRNA ~7:1 |
| LNP05 | XTC/DSPC/Cholesterol/PEG-DMG |
| | 57.5/7.5/31.5/3.5 |
| | lipid:siRNA ~6:1 |
| LNP06 | XTC/DSPC/Cholesterol/PEG-DMG |
| | 57.5/7.5/31.5/3.5 |
| | lipid:siRNA ~11:1 |
| LNP07 | XTC/DSPC/Cholesterol/PEG-DMG |
| | 60/7.5/31/1.5, |
| | lipid:siRNA ~6:1 |
| LNP08 | XTC/DSPC/Cholesterol/PEG-DMG |
| | 60/7.5/31/1.5, |
| | lipid:siRNA ~11:1 |
| LNP09 | XTC/DSPC/Cholesterol/PEG-DMG |
| | 50/10/38.5/1.5 |
| | lipid:siRNA ~10:1 |
| LNP10 | ALNY-100/DSPC/Cholesterol/PEG-DMG |
| | 50/10/38.5/1.5 |
| | lipid:siRNA ~10:1 |
| LNP11 | MC3/DSPC/Cholesterol/PEG-DMG |
| | 50/10/38.5/1.5 |
| | lipid:siRNA ~10:1 |
| LNP13 | XTC/DSPC/Cholesterol/PEG-DMG |
| | 50/10/38.5/1.5 |
| | lipid:siRNA ~33:1 |
| LNP14 | MC3/DSPC/Cholesterol/PEG-DMG |
| | 40/15/40/5 |
| | lipid:siRNA ~11:1 |
| LNP15 | MC3/DSPC/Cholesterol/PEG-DSG/GalNAc-PEG-DSG |
| | 50/10/35/4.5/0.5 |
| | lipid:siRNA ~11:1 |
| LNP16 | MC3/DSPC/Cholesterol/PEG-DMG |
| | 50/10/38.5/1.5 |
| | lipid:siRNA ~7:1 |
| LNP17 | MC3/DSPC/Cholesterol/PEG-DSG |
| | 50/10/38.5/1.5 |
| | lipid:siRNA ~10:1 |
| LNP18 | MC3/DSPC/Cholesterol/PEG-DMG |
| | 50/10/38.5/1.5 |
| | lipid:siRNA ~12:1 |
| LNP19 | MC3/DSPC/Cholesterol/PEG-DMG |
| | 50/10/35/5 |
| | lipid:siRNA ~8:1 |
| LNP20 | MC3/DSPC/Cholesterol/PEG-DPG |
| | 50/10/38.5/1.5 |
| | lipid:siRNA ~10:1 |
| LNP22 | XTC/DSPC/Cholesterol/PEG-DSG |
| | 50/10/38.5/1.5 |
| | lipid:siRNA ~10:1 |

[0259] XTC comprising formulations are described, e.g., in U.S. Provisional Ser. No. 61/239,686, filed Sep. 3, 2009, which is hereby incorporated by reference.

[0260] MC3 comprising formulations are described, e.g., in U.S. Provisional Ser. No. 61/244,834, filed Sep. 22, 2009, and U.S. Provisional Ser. No. 61/185,800, filed Jun. 10, 2009, which are hereby incorporated by reference.

[0261] ALNY-100 comprising formulations are described, e.g., International patent application number PCT/US09/63933, filed on Nov. 10, 2009, which is hereby incorporated by reference.

[0262] Additional representative formulations delineated in Tables 11 and 12. Lipid refers to a cationic lipid.

TABLE 11
Composition of exemplary nucleic acid-lipid particle (mole %)
prepared via extrusion methods.

| | | | PEG | Lipid/ |
|---|---|---|---|---|
| Lipid (mol %) | DSPC (mol %) | Chol (mol %) | (mol %) | siRNA |
| 20 | 30 | 40 | 10 | 2.13 |
| 20 | 30 | 40 | 10 | 2.35 |
| 20 | 30 | 40 | 10 | 2.37 |
| 20 | 30 | 40 | 10 | 3.23 |
| 20 | 30 | 40 | 10 | 3.91 |
| 30 | 20 | 40 | 10 | 2.89 |
| 30 | 20 | 40 | 10 | 3.34 |
| 30 | 20 | 40 | 10 | 3.34 |
| 30 | 20 | 40 | 10 | 4.10 |
| 30 | 20 | 40 | 10 | 5.64 |
| 40 | 10 | 40 | 10 | 3.02 |
| 40 | 10 | 40 | 10 | 3.35 |
| 40 | 10 | 40 | 10 | 3.74 |
| 40 | 10 | 40 | 10 | 5.80 |
| 40 | 10 | 40 | 10 | 8.00 |
| 45 | 5 | 40 | 10 | 3.27 |
| 45 | 5 | 40 | 10 | 3.30 |
| 45 | 5 | 40 | 10 | 4.45 |
| 45 | 5 | 40 | 10 | 7.00 |
| 45 | 5 | 40 | 10 | 9.80 |
| 50 | 0 | 40 | 10 | 27.03 |
| 20 | 35 | 40 | 5 | 3.00 |
| 20 | 35 | 40 | 5 | 3.32 |
| 20 | 35 | 40 | 5 | 3.05 |
| 20 | 35 | 40 | 5 | 3.67 |
| 20 | 35 | 40 | 5 | 4.71 |
| 30 | 25 | 40 | 5 | 2.47 |
| 30 | 25 | 40 | 5 | 2.98 |
| 30 | 25 | 40 | 5 | 3.29 |
| 30 | 25 | 40 | 5 | 4.99 |
| 30 | 25 | 40 | 5 | 7.15 |
| 40 | 15 | 40 | 5 | 2.79 |
| 40 | 15 | 40 | 5 | 3.29 |
| 40 | 15 | 40 | 5 | 4.33 |
| 40 | 15 | 40 | 5 | 7.05 |
| 40 | 15 | 40 | 5 | 9.63 |
| 45 | 10 | 40 | 5 | 2.44 |
| 45 | 10 | 40 | 5 | 3.21 |
| 45 | 10 | 40 | 5 | 4.29 |
| 45 | 10 | 40 | 5 | 6.50 |
| 45 | 10 | 40 | 5 | 8.67 |
| 20 | 35 | 40 | 5 | 4.10 |
| 20 | 35 | 40 | 5 | 4.83 |
| 30 | 25 | 40 | 5 | 3.86 |
| 30 | 25 | 40 | 5 | 5.38 |
| 30 | 25 | 40 | 5 | 7.07 |
| 40 | 15 | 40 | 5 | 3.85 |
| 40 | 15 | 40 | 5 | 4.88 |
| 40 | 15 | 40 | 5 | 7.22 |
| 40 | 15 | 40 | 5 | 9.75 |
| 45 | 10 | 40 | 5 | 2.83 |
| 45 | 10 | 40 | 5 | 3.85 |
| 45 | 10 | 40 | 5 | 4.88 |
| 45 | 10 | 40 | 5 | 7.05 |
| 45 | 10 | 40 | 5 | 9.29 |
| 45 | 20 | 30 | 5 | 4.01 |
| 45 | 20 | 30 | 5 | 3.70 |
| 50 | 15 | 30 | 5 | 4.75 |
| 50 | 15 | 30 | 5 | 3.80 |
| 55 | 10 | 30 | 5 | 3.85 |
| 55 | 10 | 30 | 5 | 4.13 |
| 60 | 5 | 30 | 5 | 5.09 |
| 60 | 5 | 30 | 5 | 4.67 |
| 65 | 0 | 30 | 5 | 4.75 |
| 65 | 0 | 30 | 5 | 6.06 |
| 56.5 | 10 | 30 | 3.5 | 3.70 |
| 56.5 | 10 | 30 | 3.5 | 3.56 |
| 57.5 | 10 | 30 | 2.5 | 3.48 |
| 57.5 | 10 | 30 | 2.5 | 3.20 |
| 58.5 | 10 | 30 | 1.5 | 3.24 |
| 58.5 | 10 | 30 | 1.5 | 3.13 |
| 59.5 | 10 | 30 | 0.5 | 3.24 |
| 59.5 | 10 | 30 | 0.5 | 3.03 |
| 45 | 10 | 40 | 5 | 7.57 |
| 45 | 10 | 40 | 5 | 7.24 |
| 45 | 10 | 40 | 5 | 7.48 |
| 45 | 10 | 40 | 5 | 7.84 |
| 65 | 0 | 30 | 5 | 4.01 |
| 60 | 5 | 30 | 5 | 3.70 |
| 55 | 10 | 30 | 5 | 3.65 |
| 50 | 10 | 35 | 5 | 3.43 |
| 50 | 15 | 30 | 5 | 3.80 |
| 45 | 15 | 35 | 5 | 3.70 |
| 45 | 20 | 30 | 5 | 3.75 |
| 45 | 25 | 25 | 5 | 3.85 |
| 55 | 10 | 32.5 | 2.5 | 3.61 |
| 60 | 10 | 27.5 | 2.5 | 3.65 |
| 60 | 10 | 25 | 5 | 4.07 |
| 55 | 5 | 38.5 | 1.5 | 3.75 |
| 60 | 10 | 28.5 | 1.5 | 3.43 |
| 55 | 10 | 33.5 | 1.5 | 3.48 |
| 60 | 5 | 33.5 | 1.5 | 3.43 |
| 55 | 5 | 37.5 | 2.5 | 3.75 |
| 60 | 5 | 32.5 | 2.5 | 4.52 |
| 60 | 5 | 32.5 | 2.5 | 3.52 |
| 45 | 15 (DMPC) | 35 | 5 | 3.20 |
| 45 | 15 (DPPC) | 35 | 5 | 3.43 |
| 45 | 15 (DOPC) | 35 | 5 | 4.52 |
| 45 | 15 (POPC) | 35 | 5 | 3.85 |
| 55 | 5 | 37.5 | 2.5 | 3.96 |
| 55 | 10 | 32.5 | 2.5 | 3.56 |
| 60 | 5 | 32.5 | 2.5 | 3.80 |
| 60 | 10 | 27.5 | 2.5 | 3.75 |
| 60 | 5 | 30 | 5 | 4.19 |
| 60 | 5 | 33.5 | 1.5 | 3.48 |
| 60 | 5 | 33.5 | 1.5 | 6.64 |
| 60 | 5 | 30 | 5 | 3.90 |
| 60 | 5 | 30 | 5 | 4.65 |
| 60 | 5 | 30 | 5 | 5.88 |
| 60 | 5 | 30 | 5 | 7.51 |
| 60 | 5 | 30 | 5 | 9.51 |
| 60 | 5 | 30 | 5 | 11.06 |
| 62.5 | 2.5 | 50 | 5 | 6.63 |
| 45 | 15 | 35 | 5 | 3.31 |
| 45 | 15 | 35 | 5 | 6.80 |
| 60 | 5 | 25 | 10 | 6.48 |
| 60 | 5 | 32.5 | 2.5 | 3.43 |
| 60 | 5 | 30 | 5 | 3.90 |
| 60 | 5 | 30 | 5 | 7.61 |
| 45 | 15 | 35 | 5 | 3.13 |
| 45 | 15 | 35 | 5 | 6.42 |
| 60 | 5 | 25 | 10 | 6.48 |
| 60 | 5 | 32.5 | 2.5 | 3.03 |
| 60 | 5 | 30 | 5 | 3.43 |
| 60 | 5 | 30 | 5 | 6.72 |
| 60 | 5 | 30 | 5 | 4.13 |
| 70 | 5 | 20 | 5 | 5.48 |
| 80 | 5 | 10 | 5 | 5.94 |
| 90 | 5 | 0 | 5 | 9.50 |
| 60 | 5 | 30 | 5 C12PEG | 3.85 |
| 60 | 5 | 30 | 5 | 3.70 |
| 60 | 5 | 30 | 5 C16PEG | 3.80 |
| 60 | 5 | 30 | 5 | 4.19 |
| 60 | 5 | 29 | 5 | 4.07 |
| 60 | 5 | 30 | 5 | 3.56 |
| 60 | 5 | 30 | 5 | 3.39 |
| 60 | 5 | 30 | 5 | 3.96 |
| 60 | 5 | 30 | 5 | 4.01 |
| 60 | 5 | 30 | 5 | 4.07 |
| 60 | 5 | 30 | 5 | 4.25 |
| 60 | 5 | 30 | 5 | 3.80 |
| 60 | 5 | 30 | 5 | 3.31 |
| 60 | 5 | 30 | 5 | 4.83 |
| 60 | 5 | 30 | 5 | 4.67 |
| 60 | 5 | 30 | 5 | 3.96 |
| 57.5 | 7.5 | 33.5 | 1.5 | 3.39 |
| 57.5 | 7.5 | 32.5 | 2.5 | 3.39 |
| 57.5 | 7.5 | 31.5 | 3.5 | 3.52 |
| 57.5 | 7.5 | 30 | 5 | 4.19 |
| 60 | 5 | 30 | 5 | 3.96 |
| 60 | 5 | 30 | 5 | 3.96 |
| 60 | 5 | 30 | 5 | 3.56 |
| 60 | 5 | 33.5 | 1.5 | 3.52 |
| 60 | 5 | 25 | 10 | 5.18 |
| 60 | 5 (DPPC) | 30 | 5 | 4.25 |
| 60 | 5 | 32.5 | 2.5 | 3.70 |
| 57.5 | 7.5 | 31.5 | 3.5 | 3.06 |
| 57.5 | 7.5 | 31.5 | 3.5 | 3.65 |
| 57.5 | 7.5 | 31.5 | 3.5 | 4.70 |
| 57.5 | 7.5 | 31.5 | 3.5 | 6.56 |

TABLE 12
Composition of exemplary nucleic acid-lipid particles prepared via in-
line mixing

| Lipid | DSPC | | | |
|---|---|---|---|---|
| (mol %) | (mol %) | Chol (mol %) | PEG (mol %) | Lipid A/siRNA |
| 55 | 5 | 37.5 | 2.5 | 3.96 |
| 55 | 10 | 32.5 | 2.5 | 3.56 |
| 60 | 5 | 32.5 | 2.5 | 3.80 |
| 60 | 10 | 27.5 | 2.5 | 3.75 |
| 60 | 5 | 30 | 5 | 4.19 |
| 60 | 5 | 33.5 | 1.5 | 3.48 |
| 60 | 5 | 33.5 | 1.5 | 6.64 |
| 60 | 5 | 25 | 10 | 6.79 |
| 60 | 5 | 32.5 | 2.5 | 3.96 |
| 60 | 5 | 34 | 1 | 3.75 |
| 60 | 5 | 34.5 | 0.5 | 3.28 |
| 50 | 5 | 40 | 5 | 3.96 |
| 60 | 5 | 30 | 5 | 4.75 |
| 70 | 5 | 20 | 5 | 5.00 |
| 80 | 5 | 10 | 5 | 5.18 |
| 60 | 5 | 30 | 5 | 13.60 |
| 60 | 5 | 30 | 5 | 14.51 |
| 60 | 5 | 30 | 5 | 6.20 |
| 60 | 5 | 30 | 5 | 4.60 |
| 60 | 5 | 30 | 5 | 6.20 |
| 60 | 5 | 30 | 5 | 5.82 |
| 40 | 5 | 54 | 1 | 3.39 |
| 40 | 7.5 | 51.5 | 1 | 3.39 |
| 40 | 10 | 49 | 1 | 3.39 |
| 50 | 5 | 44 | 1 | 3.39 |
| 50 | 7.5 | 41.5 | 1 | 3.43 |
| 50 | 10 | 39 | 1 | 3.35 |
| 60 | 5 | 34 | 1 | 3.52 |
| 60 | 7.5 | 31.5 | 1 | 3.56 |
| 60 | 10 | 29 | 1 | 3.80 |
| 70 | 5 | 24 | 1 | 3.70 |
| 70 | 7.5 | 21.5 | 1 | 4.13 |
| 70 | 10 | 19 | 1 | 3.85 |
| 60 | 5 | 34 | 1 | 3.52 |
| 60 | 5 | 34 | 1 | 3.70 |
| 60 | 5 | 34 | 1 | 3.52 |
| 60 | 7.5 | 27.5 | 5 | 5.18 |
| 60 | 7.5 | 29 | 3.5 | 4.45 |
| 60 | 5 | 31.5 | 3.5 | 4.83 |
| 60 | 7.5 | 31 | 1.5 | 3.48 |
| 57.5 | 7.5 | 30 | 5 | 4.75 |
| 57.5 | 7.5 | 31.5 | 3.5 | 4.83 |
| 57.5 | 5 | 34 | 3.5 | 4.67 |
| 57.5 | 7.5 | 33.5 | 1.5 | 3.43 |
| 55 | 7.5 | 32.5 | 5 | 4.38 |
| 55 | 7.5 | 34 | 3.5 | 4.13 |
| 55 | 5 | 36.5 | 3.5 | 4.38 |
| 55 | 7.5 | 36 | 1.5 | 3.35 |

[0263] Synthesis of Cationic Lipids.

[0264] Any of the compounds, e.g., cationic lipids and the like, used in the nucleic acid-lipid particles of the invention may be prepared by known organic synthesis techniques, including the methods described in more detail in the Examples. All substituents are as defined below unless indicated otherwise.

[0265] “Alkyl” means a straight chain or branched, noncyclic or cyclic, saturated aliphatic hydrocarbon containing from 1 to 24 carbon atoms. Representative saturated straight chain alkyls include methyl, ethyl, n-propyl, n-butyl, n-pentyl, n-hexyl, and the like; while saturated branched alkyls include isopropyl, sec-butyl, isobutyl, tert-butyl, isopentyl, and the like. Representative saturated cyclic alkyls include cyclopropyl, cyclobutyl, cyclopentyl, cyclohexyl, and the like; while unsaturated cyclic alkyls include cyclopentenyl and cyclohexenyl, and the like.

[0266] “Alkenyl” means an alkyl, as defined above, containing at least one double bond between adjacent carbon atoms. Alkenyls include both cis and trans isomers. Representative straight chain and branched alkenyls include ethylenyl, propylenyl, 1-butenyl, 2-butenyl, isobutylenyl, 1-pentenyl, 2-pentenyl, 3-methyl-1-butenyl, 2-methyl-2-butenyl, 2,3-dimethyl-2-butenyl, and the like.

[0267] “Alkynyl” means any alkyl or alkenyl, as defined above, which additionally contains at least one triple bond between adjacent carbons. Representative straight chain and branched alkynyls include acetylenyl, propynyl, 1-butynyl, 2-butynyl, 1-pentynyl, 2-pentynyl, 3-methyl-1 butynyl, and the like.

[0268] “Acyl” means any alkyl, alkenyl, or alkynyl wherein the carbon at the point of attachment is substituted with an oxo group, as defined below. For example, —C(═O)alkyl, —C(═O)alkenyl, and —C(═O)alkynyl are acyl groups.

[0269] “Heterocycle” means a 5- to 7-membered monocyclic, or 7- to 10-membered bicyclic, heterocyclic ring which is either saturated, unsaturated, or aromatic, and which contains from 1 or 2 heteroatoms independently selected from nitrogen, oxygen and sulfur, and wherein the nitrogen and sulfur heteroatoms may be optionally oxidized, and the nitrogen heteroatom may be optionally quatemized, including bicyclic rings in which any of the above heterocycles are fused to a benzene ring. The heterocycle may be attached via any heteroatom or carbon atom. Heterocycles include heteroaryls as defined below. Heterocycles include morpholinyl, pyrrolidinonyl, pyrrolidinyl, piperidinyl, piperizynyl, hydantoinyl, valerolactamyl, oxiranyl, oxetanyl, tetrahydrofuranyl, tetrahydropyranyl, tetrahydropyridinyl, tetrahydroprimidinyl, tetrahydrothiophenyl, tetrahydrothiopyranyl, tetrahydropyrimidinyl, tetrahydrothiophenyl, tetrahydrothiopyranyl, and the like.

[0270] The terms “optionally substituted alkyl”, “optionally substituted alkenyl”, “optionally substituted alkynyl”, “optionally substituted acyl”, and “optionally substituted heterocycle” means that, when substituted, at least one hydrogen atom is replaced with a substituent. In the case of an oxo substituent (═O) two hydrogen atoms are replaced. In this regard, substituents include oxo, halogen, heterocycle, —CN, —OR^{x}, —NR^{x}R^{y}, —NR^{x}C(═O)R^{y}, —NR^{x}SO₂R^{y}, —C(═O)R^{x}, —C(═O)OR^{x}, —C(═O)NR^{x}R^{y}, —SO—R^{x} and —SOₙNR^{x}R^{y}, wherein n is 0, 1 or 2, R^{x} and R^{y} are the same or different and independently hydrogen, alkyl or heterocycle, and each of said alkyl and heterocycle substituents may be further substituted with one or more of oxo, halogen, —OH, —CN, alkyl, —OR′, heterocycle, —NR^{x}R^{y}, —NR^{x}C(═O)R^{y}, —NR^{x}SO₂R^{y}, —C(═O)R^{x}, —C(═O)OR^{x}, —C(═O)NR^{x}R^{y}, —SO—R^{x} and —SOₙNR^{x}R^{y}.

[0271] “Halogen” means fluoro, chloro, bromo and iodo.

[0272] In some embodiments, the methods of the invention may require the use of protecting groups. Protecting group methodology is well known to those skilled in the art (see, for example, PROTECTIVE GROUPS IN ORGANIC SYNTHESIS, Green, T. W. et al., Wiley-Interscience, New York City, 1999). Briefly, protecting groups within the context of this invention are any group that reduces or eliminates unwanted reactivity of a functional group. A protecting group can be added to a functional group to mask its reactivity during certain reactions and then removed to reveal the original functional group. In some embodiments an “alcohol protecting group” is used. An “alcohol protecting group” is any group which decreases or eliminates unwanted reactivity of an alcohol functional group. Protecting groups can be added and removed using techniques well known in the art.

[0273] Synthesis of MC3

[0274] Preparation of DLin-M-C3-DMA (i.e., (6Z,9Z,28Z,31Z)-heptatriaconta-6,9,28,31-tetraen-19-yl 4-(dimethylamino)butanoate) was as follows. A solution of (6Z,9Z,28Z,31Z)-heptatriaconta-6,9,28,31-tetraen-19-ol (0.53 g), 4-N,N-dimethylaminobutyric acid hydrochloride (0.51 g), 4-N,N-dimethylaminopyridine (0.61 g) and 1-ethyl-3-(3-dimethylaminopropyl)carbodiimide hydrochloride (0.53 g) in dichloromethane (5 mL) was stirred at room temperature overnight. The solution was washed with dilute hydrochloric acid followed by dilute aqueous sodium bicarbonate. The organic fractions were dried over anhydrous magnesium sulphate, filtered and the solvent removed on a rotovap. The residue was passed down a silica gel column (20 g) using a 1-5% methanol/dichloromethane elution gradient. Fractions containing the purified product were combined and the solvent removed, yielding a colorless oil (0.54 g). Further description is provided in WO 2010/054401 (PCTUS2009/063927 filed on Nov. 10, 2009 and U.S. patent application Ser. No. 12/813,448 filed on Jun. 10, 2010.

[0275] Synthesis of Formula A

[0276] In one embodiment, nucleic acid-lipid particles of the invention are formulated using a cationic lipid of formula A:

[chemical structure]

[0277] where R1 and R2 are independently alkyl, alkenyl or alkynyl, each can be optionally substituted, and R3 and R4 are independently lower alkyl or R3 and R4 can be taken together to form an optionally substituted heterocyclic ring. In some embodiments, the cationic lipid is XTC (2,2-Dilinoleyl-4-dimethylaminoethyl[1,3]-dioxolane). In general, the lipid of formula A above may be made by the following Reaction Schemes 1 or 2, wherein all substituents are as defined above unless indicated otherwise.

[chemical structure]

[0278] Lipid A, where R₁ and R₂ are independently alkyl, alkenyl or alkynyl, each can be optionally substituted, and R₃ and R₄ are independently lower alkyl or R₃ and R₄ can be taken together to form an optionally substituted heterocyclic ring, can be prepared according to Scheme 1. Ketone 1 and bromide 2 can be purchased or prepared according to methods known to those of ordinary skill in the art. Reaction of 1 and 2 yields ketal 3. Treatment of ketal 3 with amine 4 yields lipids of formula A. The lipids of formula A can be converted to the corresponding ammonium salt with an organic salt of formula 5, where Xis anion counter ion selected from halogen, hydroxide, phosphate, sulfate, or the like.

[chemical structure]

[0279] Alternatively, the ketone 1 starting material can be prepared according to Scheme 2. Grignard reagent 6 and cyanide 7 can be purchased or prepared according to methods known to those of ordinary skill in the art. Reaction of 6 and 7 yields ketone 1. Conversion of ketone 1 to the corresponding lipids of formula A is as described in Scheme 1.

[0280] Synthesis of ALNY-100

[0281] Synthesis of ketal 519 [ALNY-100] was performed using the following scheme 3:

[chemical structure]

[0282] Synthesis of 515:

[0283] To a stirred suspension of LiAlH4 (3.74 g, 0.09852 mol) in 200 ml anhydrous THF in a two neck RBF (1 L), was added a solution of 514 (10 g, 0.04926 mol) in 70 mL of THF slowly at 0° C. under nitrogen atmosphere. After complete addition, reaction mixture was warmed to room temperature and then heated to reflux for 4 h. Progress of the reaction was monitored by TLC. After completion of reaction (by TLC) the mixture was cooled to 0° C. and quenched with careful addition of saturated Na2SO4 solution. Reaction mixture was stirred for 4 h at room temperature and filtered off. Residue was washed well with THF. The filtrate and washings were mixed and diluted with 400 mL dioxane and 26 mL conc. HCl and stirred for 20 minutes at room temperature. The volatilities were stripped off under vacuum to furnish the hydrochloride salt of 515 as a white solid. Yield: 7.12 g 1H-NMR (DMSO, 400 MHz): δ=9.34 (broad, 2H), 5.68 (s, 2H), 3.74 (m, 1H), 2.66-2.60 (m, 2H), 2.50-2.45 (m, 5H).

[0284] Synthesis of 516:

[0285] To a stirred solution of compound 515 in 100 mL dry DCM in a 250 mL two neck RBF, was added NEt3 (37.2 mL, 0.2669 mol) and cooled to 0° C. under nitrogen atmosphere. After a slow addition of N-(benzyloxy-carbonyloxy)-succinimide (20 g, 0.08007 mol) in 50 mL dry DCM, reaction mixture was allowed to warm to room temperature. After completion of the reaction (2-3 h by TLC) mixture was washed successively with 1N HCl solution (1×100 mL) and saturated NaHCO3 solution (1×50 mL). The organic layer was then dried over anhyd. Na2SO4 and the solvent was evaporated to give crude material which was purified by silica gel column chromatography to get 516 as sticky mass. Yield: 11 g (89%). 1H-NMR (CDCl3, 400 MHz): δ=7.36-7.27 (m, 5H), 5.69 (s, 2H), 5.12 (s, 2H), 4.96 (br., 1H) 2.74 (s, 3H), 2.60 (m, 2H), 2.30-2.25 (m, 2H). LC-MS [M+H]-232.3 (96.94%).

[0286] Synthesis of 517A and 517B:

[0287] The cyclopentene 516 (5 g, 0.02164 mol) was dissolved in a solution of 220 mL acetone and water (10:1) in a single neck 500 mL RBF and to it was added N-methyl morpholine-N-oxide (7.6 g, 0.06492 mol) followed by 4.2 mL of 7.6% solution of OsO4 (0.275 g, 0.00108 mol) in tert-butanol at room temperature. After completion of the reaction (˜3 h), the mixture was quenched with addition of solid Na2SO3 and resulting mixture was stirred for 1.5 h at room temperature. Reaction mixture was diluted with DCM (300 mL) and washed with water (2×100 mL) followed by saturated NaHCO3 (1×50 mL) solution, water (1×30 mL) and finally with brine (lx 50 mL). Organic phase was dried over an.Na2SO4 and solvent was removed in vacuum. Silica gel column chromatographic purification of the crude material was afforded a mixture of diastereomers, which were separated by prep HPLC. Yield:—6 g crude

[0288] 517A—Peak-1 (white solid), 5.13 g (96%). 1H-NMR (DMSO, 400 MHz): δ=7.39-7.31 (m, 5H), 5.04 (s, 2H), 4.78-4.73 (m, 1H), 4.48-4.47 (d, 2H), 3.94-3.93 (m, 2H), 2.71 (s, 3H), 1.72-1.67 (m, 4H). LC-MS—[M+H]-266.3, [M+NH4+]-283.5 present, HPLC-97.86%. Stereochemistry confirmed by X-ray.

[0289] Synthesis of 518:

[0290] Using a procedure analogous to that described for the synthesis of compound 505, compound 518 (1.2 g, 41%) was obtained as a colorless oil. 1H-NMR (CDCl3, 400 MHz): δ=7.35-7.33 (m, 4H), 7.30-7.27 (m, 1H), 5.37-5.27 (m, 8H), 5.12 (s, 2H), 4.75 (m, 1H), 4.58-4.57 (m, 2H), 2.78-2.74 (m, 7H), 2.06-2.00 (m, 8H), 1.96-1.91 (m, 2H), 1.62 (m, 4H), 1.48 (m, 2H), 1.37-1.25 (br m, 36H), 0.87 (m, 6H). HPLC-98.65%.

[0291] General Procedure for the Synthesis of Compound 519:

[0292] A solution of compound 518 (1 eq) in hexane (15 mL) was added in a drop-wise fashion to an ice-cold solution of LAH in THF (1 M, 2 eq). After complete addition, the mixture was heated at 40□C over 0.5 h then cooled again on an ice bath. The mixture was carefully hydrolyzed with saturated aqueous Na2SO4 then filtered through celite and reduced to an oil. Column chromatography provided the pure 519 (1.3 g, 68%) which was obtained as a colorless oil. 13C NMR □=130.2, 130.1 (×2), 127.9 (×3), 112.3, 79.3, 64.4, 44.7, 38.3, 35.4, 31.5, 29.9 (×2), 29.7, 29.6 (×2), 29.5 (×3), 29.3 (×2), 27.2 (×3), 25.6, 24.5, 23.3, 226, 14.1; Electrospray MS (+ve): Molecular weight for C44H80NO2 (M+H)+ Calc. 654.6. Found 654.6.

[0293] Therapeutic Agent-Lipid Particle Compositions and Formulations

[0294] The invention includes compositions comprising a lipid particle of the invention and an active agent, wherein the active agent is associated with the lipid particle. In particular embodiments, the active agent is a therapeutic agent. In particular embodiments, the active agent is encapsulated within an aqueous interior of the lipid particle. In other embodiments, the active agent is present within one or more lipid layers of the lipid particle. In other embodiments, the active agent is bound to the exterior or interior lipid surface of a lipid particle.

[0295] “Fully encapsulated” as used herein indicates that the nucleic acid in the particles is not significantly degraded after exposure to serum or a nuclease assay that would significantly degrade free DNA. In a fully encapsulated system, preferably less than 25% of particle nucleic acid is degraded in a treatment that would normally degrade 100% of free nucleic acid, more preferably less than 10% and most preferably less than 5% of the particle nucleic acid is degraded. Alternatively, full encapsulation may be determined by an Oligreen® assay. Oligreen® is an ultra-sensitive fluorescent nucleic acid stain for quantitating oligonucleotides and single-stranded DNA in solution (available from Invitrogen Corporation, Carlsbad, Calif.). Fully encapsulated also suggests that the particles are serum stable, that is, that they do not rapidly decompose into their component parts upon in vivo administration.

[0296] Active agents, as used herein, include any molecule or compound capable of exerting a desired effect on a cell, tissue, organ, or subject. Such effects may be biological, physiological, or cosmetic, for example. Active agents may be any type of molecule or compound, including e.g., nucleic acids, peptides and polypeptides, including, e.g., antibodies, such as, e.g., polyclonal antibodies, monoclonal antibodies, antibody fragments; humanized antibodies, recombinant antibodies, recombinant human antibodies, and Primatized™ antibodies, cytokines, growth factors, apoptotic factors, differentiation-inducing factors, cell surface receptors and their ligands; hormones; and small molecules, including small organic molecules or compounds.

[0297] In one embodiment, the active agent is a therapeutic agent, or a salt or derivative thereof. Therapeutic agent derivatives may be therapeutically active themselves or they may be prodrugs, which become active upon further modification. Thus, in one embodiment, a therapeutic agent derivative retains some or all of the therapeutic activity as compared to the unmodified agent, while in another embodiment, a therapeutic agent derivative lacks therapeutic activity.

[0298] In various embodiments, therapeutic agents include any therapeutically effective agent or drug, such as anti-inflammatory compounds, anti-depressants, stimulants, analgesics, antibiotics, birth control medication, antipyretics, vasodilators, anti-angiogenics, cytovascular agents, signal transduction inhibitors, cardiovascular drugs, e.g., anti-arrhythmic agents, vasoconstrictors, hormones, and steroids.

[0299] In certain embodiments, the therapeutic agent is an oncology drug, which may also be referred to as an anti-tumor drug, an anti-cancer drug, a tumor drug, an antineoplastic agent, or the like. Examples of oncology drugs that may be used according to the invention include, but are not limited to, adriamycin, alkeran, allopurinol, altretamine, amifostine, anastrozole, araC, arsenic trioxide, azathioprine, bexarotene, biCNU, bleomycin, busulfan intravenous, busulfan oral, capecitabine (Xeloda), carboplatin, carmustine, CCNU, celecoxib, chlorambucil, cisplatin, cladribine, cyclosporin A, cytarabine, cytosine arabinoside, daunorubicin, cytoxan, daunorubicin, dexamethasone, dexrazoxane, dodetaxel, doxorubicin, doxorubicin, DTIC, epirubicin, estramustine, etoposide phosphate, etoposide and VP-16, exemestane, FK506, fludarabine, fluorouracil, 5-FU, gemcitabine (Gemzar), gemtuzumab-ozogamicin, goserelin acetate, hydrea, hydroxyurea, idarubicin, ifosfamide, imatinib mesylate, interferon, irinotecan (Camptostar, CPT-111), letrozole, leucovorin, leustatin, leuprolide, levamisole, litretinoin, megastrol, melphalan, L-PAM, mesna, methotrexate, methoxsalen, mithramycin, mitomycin, mitoxantrone, nitrogen mustard, paclitaxel, pamidronate, Pegademase, pentostatin, porfimer sodium, prednisone, rituxan, streptozocin, STI-571, tamoxifen, taxotere, temozolamide, teniposide, VM-26, topotecan (Hycamtin), toremifene, tretinoin, ATRA, valrubicin, velban, vinblastine, vincristine, VP16, and vinorelbine. Other examples of oncology drugs that may be used according to the invention are ellipticin and ellipticin analogs or derivatives, epothilones, intracellular kinase inhibitors and camptothecins.

[0300] Additional Formulations

[0301] Emulsions

[0302] The compositions of the present invention may be prepared and formulated as emulsions. Emulsions are typically heterogeneous systems of one liquid dispersed in another in the form of droplets usually exceeding 0.1 μm in diameter (Idson, in Pharmaceutical Dosage Forms, Lieberman, Rieger and Banker (Eds.), 1988, Marcel Dekker, Inc., New York, N.Y., volume 1, p. 199; Rosoff, in Pharmaceutical Dosage Forms, Lieberman, Rieger and Banker (Eds.), 1988, Marcel Dekker, Inc., New York, N.Y., Volume 1, p. 245; Block in Pharmaceutical Dosage Forms, Lieberman, Rieger and Banker (Eds.), 1988, Marcel Dekker, Inc., New York, N.Y., volume 2, p. 335; Higuchi et al., in Remington's Pharmaceutical Sciences, Mack Publishing Co., Easton, Pa., 1985, p. 301). Emulsions are often biphasic systems comprising two immiscible liquid phases intimately mixed and dispersed with each other. In general, emulsions may be of either the water-in-oil (w/o) or the oil-in-water (o/w) variety. When an aqueous phase is finely divided into and dispersed as minute droplets into a bulk oily phase, the resulting composition is called a water-in-oil (w/o) emulsion. Alternatively, when an oily phase is finely divided into and dispersed as minute droplets into a bulk aqueous phase, the resulting composition is called an oil-in-water (o/w) emulsion. Emulsions may contain additional components in addition to the dispersed phases, and the active drug which may be present as a solution in either the aqueous phase, oily phase or itself as a separate phase. Pharmaceutical excipients such as emulsifiers, stabilizers, dyes, and anti-oxidants may also be present in emulsions as needed. Pharmaceutical emulsions may also be multiple emulsions that are comprised of more than two phases such as, for example, in the case of oil-in-water-in-oil (o/w/o) and water-in-oil-in-water (w/o/w) emulsions. Such complex formulations often provide certain advantages that simple binary emulsions do not. Multiple emulsions in which individual oil droplets of an o/w emulsion enclose small water droplets constitute a w/o/w emulsion. Likewise a system of oil droplets enclosed in globules of water stabilized in an oily continuous phase provides an o/w/o emulsion.

[0303] Emulsions are characterized by little or no thermodynamic stability. Often, the dispersed or discontinuous phase of the emulsion is well dispersed into the external or continuous phase and maintained in this form through the means of emulsifiers or the viscosity of the formulation. Either of the phases of the emulsion may be a semisolid or a solid, as is the case of emulsion-style ointment bases and creams. Other means of stabilizing emulsions entail the use of emulsifiers that may be incorporated into either phase of the emulsion. Emulsifiers may broadly be classified into four categories: synthetic surfactants, naturally occurring emulsifiers, absorption bases, and finely dispersed solids (Idson, in Pharmaceutical Dosage Forms, Lieberman, Rieger and Banker (Eds.), 1988, Marcel Dekker, Inc., New York, N.Y., volume 1, p. 199).

[0304] Synthetic surfactants, also known as surface active agents, have found wide applicability in the formulation of emulsions and have been reviewed in the literature (Rieger, in Pharmaceutical Dosage Forms, Lieberman, Rieger and Banker (Eds.), 1988, Marcel Dekker, Inc., New York, N.Y., volume 1, p. 285; Idson, in Pharmaceutical Dosage Forms, Lieberman, Rieger and Banker (Eds.), Marcel Dekker, Inc., New York, N.Y., 1988, volume 1, p. 199). Surfactants are typically amphiphilic and comprise a hydrophilic and a hydrophobic portion. The ratio of the hydrophilic to the hydrophobic nature of the surfactant has been termed the hydrophile/lipophile balance (HLB) and is a valuable tool in categorizing and selecting surfactants in the preparation of formulations. Surfactants may be classified into different classes based on the nature of the hydrophilic group: nonionic, anionic, cationic and amphoteric (Rieger, in Pharmaceutical Dosage Forms, Lieberman, Rieger and Banker (Eds.), 1988, Marcel Dekker, Inc., New York, N.Y., volume 1, p. 285).

[0305] Naturally occurring emulsifiers used in emulsion formulations include lanolin, beeswax, phosphatides, lecithin and acacia. Absorption bases possess hydrophilic properties such that they can soak up water to form w/o emulsions yet retain their semisolid consistencies, such as anhydrous lanolin and hydrophilic petrolatum. Finely divided solids have also been used as good emulsifiers especially in combination with surfactants and in viscous preparations. These include polar inorganic solids, such as heavy metal hydroxides, non-swelling clays such as bentonite, attapulgite, hectorite, kaolin, montmorillonite, colloidal aluminum silicate and colloidal magnesium aluminum silicate, pigments and nonpolar solids such as carbon or glyceryl tristearate.

[0306] Large varieties of non-emulsifying materials are also included in emulsion formulations and contribute to the properties of emulsions. These include fats, oils, waxes, fatty acids, fatty alcohols, fatty esters, humectants, hydrophilic colloids, preservatives and antioxidants (Block, in Pharmaceutical Dosage Forms, Lieberman, Rieger and Banker (Eds.), 1988, Marcel Dekker, Inc., New York, N.Y., volume 1, p. 335; Idson, in Pharmaceutical Dosage Forms, Lieberman, Rieger and Banker (Eds.), 1988, Marcel Dekker, Inc., New York, N.Y., volume 1, p. 199).

[0307] Hydrophilic colloids or hydrocolloids include naturally occurring gums and synthetic polymers such as polysaccharides (for example, acacia, agar, alginic acid, carrageenan, guar gum, karaya gum, and tragacanth), cellulose derivatives (for example, carboxymethylcellulose and carboxypropylcellulose), and synthetic polymers (for example, carbomers, cellulose ethers, and carboxyvinyl polymers). These disperse or swell in water to form colloidal solutions that stabilize emulsions by forming strong interfacial films around the dispersed-phase droplets and by increasing the viscosity of the external phase.

[0308] Since emulsions often contain a number of ingredients such as carbohydrates, proteins, sterols and phosphatides that may readily support the growth of microbes, these formulations often incorporate preservatives. Commonly used preservatives included in emulsion formulations include methyl paraben, propyl paraben, quaternary ammonium salts, benzalkonium chloride, esters of p-hydroxybenzoic acid, and boric acid. Antioxidants are also commonly added to emulsion formulations to prevent deterioration of the formulation. Antioxidants used may be free radical scavengers such as tocopherols, alkyl gallates, butylated hydroxyanisole, butylated hydroxytoluene, or reducing agents such as ascorbic acid and sodium metabisulfite, and antioxidant synergists such as citric acid, tartaric acid, and lecithin.

[0309] The application of emulsion formulations via dermatological, oral and parenteral routes and methods for their manufacture has been reviewed in the literature (Idson, in Pharmaceutical Dosage Forms, Lieberman, Rieger and Banker (Eds.), 1988, Marcel Dekker, Inc., New York, N.Y., volume 1, p. 199). Emulsion formulations for oral delivery have been very widely used because of ease of formulation, as well as efficacy from an absorption and bioavailability standpoint (Rosoff, in Pharmaceutical Dosage Forms, Lieberman, Rieger and Banker (Eds.), 1988, Marcel Dekker, Inc., New York, N.Y., volume 1, p. 245; Idson, in Pharmaceutical Dosage Forms, Lieberman, Rieger and Banker (Eds.), 1988, Marcel Dekker, Inc., New York, N.Y., volume 1, p. 199). Mineral-oil base laxatives, oil-soluble vitamins and high fat nutritive preparations are among the materials that have commonly been administered orally as o/w emulsions.

[0310] In one embodiment of the present invention, the compositions of dsRNAs and nucleic acids are formulated as microemulsions. A microemulsion may be defined as a system of water, oil and amphiphile which is a single optically isotropic and thermodynamically stable liquid solution (Rosoff, in Pharmaceutical Dosage Forms, Lieberman, Rieger and Banker (Eds.), 1988, Marcel Dekker, Inc., New York, N.Y., volume 1, p. 245). Typically microemulsions are systems that are prepared by first dispersing an oil in an aqueous surfactant solution and then adding a sufficient amount of a fourth component, generally an intermediate chain-length alcohol to form a transparent system. Therefore, microemulsions have also been described as thermodynamically stable, isotropically clear dispersions of two immiscible liquids that are stabilized by interfacial films of surface-active molecules (Leung and Shah, in: Controlled Release of Drugs: Polymers and Aggregate Systems, Rosoff, M., Ed., 1989, VCH Publishers, New York, pages 185-215). Microemulsions commonly are prepared via a combination of three to five components that include oil, water, surfactant, cosurfactant and electrolyte. Whether the microemulsion is of the water-in-oil (w/o) or an oil-in-water (o/w) type is dependent on the properties of the oil and surfactant used and on the structure and geometric packing of the polar heads and hydrocarbon tails of the surfactant molecules (Schott, in Remington's Pharmaceutical Sciences, Mack Publishing Co., Easton, Pa., 1985, p. 271).

[0311] The phenomenological approach utilizing phase diagrams has been extensively studied and has yielded a comprehensive knowledge, to one skilled in the art, of how to formulate microemulsions (Rosoff, in Pharmaceutical Dosage Forms, Lieberman, Rieger and Banker (Eds.), 1988, Marcel Dekker, Inc., New York, N.Y., volume 1, p. 245; Block, in Pharmaceutical Dosage Forms, Lieberman, Rieger and Banker (Eds.), 1988, Marcel Dekker, Inc., New York, N.Y., volume 1, p. 335). Compared to conventional emulsions, microemulsions offer the advantage of solubilizing water-insoluble drugs in a formulation of thermodynamically stable droplets that are formed spontaneously.

[0312] Surfactants used in the preparation of microemulsions include, but are not limited to, ionic surfactants, non-ionic surfactants, Brij 96, polyoxyethylene oleyl ethers, polyglycerol fatty acid esters, tetraglycerol monolaurate (ML310), tetraglycerol monooleate (MO310), hexaglycerol monooleate (PO310), hexaglycerol pentaoleate (PO500), decaglycerol monocaprate (MCA750), decaglycerol monooleate (MO750), decaglycerol sequioleate (SO750), decaglycerol decaoleate (DAO750), alone or in combination with cosurfactants. The cosurfactant, usually a short-chain alcohol such as ethanol, 1-propanol, and 1-butanol, serves to increase the interfacial fluidity by penetrating into the surfactant film and consequently creating a disordered film because of the void space generated among surfactant molecules. Microemulsions may, however, be prepared without the use of cosurfactants and alcohol-free self-emulsifying microemulsion systems are known in the art. The aqueous phase may typically be, but is not limited to, water, an aqueous solution of the drug, glycerol, PEG300, PEG400, polyglycerols, propylene glycols, and derivatives of ethylene glycol. The oil phase may include, but is not limited to, materials such as Captex 300, Captex 355, Capmul MCM, fatty acid esters, medium chain (C8-C12) mono, di, and tri-glycerides, polyoxyethylated glyceryl fatty acid esters, fatty alcohols, polyglycolized glycerides, saturated polyglycolized C8-C10 glycerides, vegetable oils and silicone oil.

[0313] Microemulsions are particularly of interest from the standpoint of drug solubilization and the enhanced absorption of drugs. Lipid based microemulsions (both o/w and w/o) have been proposed to enhance the oral bioavailability of drugs, including peptides (Constantinides et al., Pharmaceutical Research, 1994, 11, 1385-1390; Ritschel, Meth. Find. Exp. Clin. Pharmacol., 1993, 13, 205). Microemulsions afford advantages of improved drug solubilization, protection of drug from enzymatic hydrolysis, possible enhancement of drug absorption due to surfactant-induced alterations in membrane fluidity and permeability, ease of preparation, ease of oral administration over solid dosage forms, improved clinical potency, and decreased toxicity (Constantinides et al., Pharmaceutical Research, 1994, 11, 1385; Ho et al., J. Pharm. Sci., 1996, 85, 138-143). Often microemulsions may form spontaneously when their components are brought together at ambient temperature. This may be particularly advantageous when formulating thermolabile drugs, peptides or dsRNAs. Microemulsions have also been effective in the transdermal delivery of active components in both cosmetic and pharmaceutical applications. It is expected that the microemulsion compositions and formulations of the present invention will facilitate the increased systemic absorption of dsRNAs and nucleic acids from the gastrointestinal tract, as well as improve the local cellular uptake of dsRNAs and nucleic acids.

[0314] Microemulsions of the present invention may also contain additional components and additives such as sorbitan monostearate (Grill 3), Labrasol, and penetration enhancers to improve the properties of the formulation and to enhance the absorption of the dsRNAs and nucleic acids of the present invention. Penetration enhancers used in the microemulsions of the present invention may be classified as belonging to one of five broad categories—surfactants, fatty acids, bile salts, chelating agents, and non-chelating non-surfactants (Lee et al., Critical Reviews in Therapeutic Drug Carrier Systems, 1991, p. 92). Each of these classes has been discussed above.

[0315] Penetration Enhancers

[0316] In one embodiment, the present invention employs various penetration enhancers to effect the efficient delivery of nucleic acids, particularly dsRNAs, to the skin of animals. Most drugs are present in solution in both ionized and nonionized forms. However, usually only lipid soluble or lipophilic drugs readily cross cell membranes. It has been discovered that even non-lipophilic drugs may cross cell membranes if the membrane to be crossed is treated with a penetration enhancer. In addition to aiding the diffusion of non-lipophilic drugs across cell membranes, penetration enhancers also enhance the permeability of lipophilic drugs.

[0317] Penetration enhancers may be classified as belonging to one of five broad categories, i.e., surfactants, fatty acids, bile salts, chelating agents, and non-chelating non-surfactants (Lee et al., Critical Reviews in Therapeutic Drug Carrier Systems, 1991, p. 92). Each of the above mentioned classes of penetration enhancers are described below in greater detail.

[0318] Surfactants: In connection with the present invention, surfactants (or “surface-active agents”) are chemical entities which, when dissolved in an aqueous solution, reduce the surface tension of the solution or the interfacial tension between the aqueous solution and another liquid, with the result that absorption of dsRNAs through the mucosa is enhanced. In addition to bile salts and fatty acids, these penetration enhancers include, for example, sodium lauryl sulfate, polyoxyethylene-9-lauryl ether and polyoxyethylene-20-cetyl ether) (Lee et al., Critical Reviews in Therapeutic Drug Carrier Systems, 1991, p. 92); and perfluorochemical emulsions, such as FC-43. Takahashi et al., J. Pharm. Pharmacol., 1988, 40, 252).

[0319] Fatty acids: Various fatty acids and their derivatives which act as penetration enhancers include, for example, oleic acid, lauric acid, capric acid (n-decanoic acid), myristic acid, palmitic acid, stearic acid, linoleic acid, linolenic acid, dicaprate, tricaprate, monoolein (1-monooleoyl-rac-glycerol), dilaurin, caprylic acid, arachidonic acid, glycerol 1-monocaprate, 1-dodecylazacycloheptan-2-one, acylcarnitines, acylcholines, C₁₋₁₀ alkyl esters thereof (e.g., methyl, isopropyl and t-butyl), and mono- and di-glycerides thereof (i.e., oleate, laurate, caprate, myristate, palmitate, stearate, linoleate, etc.) (Lee et al., Critical Reviews in Therapeutic Drug Carrier Systems, 1991, p. 92; Muranishi, Critical Reviews in Therapeutic Drug Carrier Systems, 1990, 7, 1-33; El Hariri et al., J. Pharm. Pharmacol., 1992, 44, 651-654).

[0320] Bile salts: The physiological role of bile includes the facilitation of dispersion and absorption of lipids and fat-soluble vitamins (Brunton, Chapter 38 in: Goodman & Gilman's The Pharmacological Basis of Therapeutics, 9th Ed., Hardman et al. Eds., McGraw-Hill, New York, 1996, pp. 934-935). Various natural bile salts, and their synthetic derivatives, act as penetration enhancers. Thus the term “bile salts” includes any of the naturally occurring components of bile as well as any of their synthetic derivatives. Suitable bile salts include, for example, cholic acid (or its pharmaceutically acceptable sodium salt, sodium cholate), dehydrocholic acid (sodium dehydrocholate), deoxycholic acid (sodium deoxycholate), glucholic acid (sodium glucholate), glycholic acid (sodium glycocholate), glycodeoxycholic acid (sodium glycodeoxycholate), taurocholic acid (sodium taurocholate), taurodeoxycholic acid (sodium taurodeoxycholate), chenodeoxycholic acid (sodium chenodeoxycholate), ursodeoxycholic acid (UDCA), sodium tauro-24,25-dihydro-fusidate (STDHF), sodium glycodihydrofusidate and polyoxyethylene-9-lauryl ether (POE) (Lee et al., Critical Reviews in Therapeutic Drug Carrier Systems, 1991, page 92; Swinyard, Chapter 39 In: Remington's Pharmaceutical Sciences, 18th Ed., Gennaro, ed., Mack Publishing Co., Easton, Pa., 1990, pages 782-783; Muranishi, Critical Reviews in Therapeutic Drug Carrier Systems, 1990, 7, 1-33; Yamamoto et al., J. Pharm. Exp. Ther., 1992, 263, 25; Yamashita et al., J. Pharm. Sci., 1990, 79, 579-583).

[0321] Chelating Agents: Chelating agents, as used in connection with the present invention, can be defined as compounds that remove metallic ions from solution by forming complexes therewith, with the result that absorption of dsRNAs through the mucosa is enhanced. With regards to their use as penetration enhancers in the present invention, chelating agents have the added advantage of also serving as DNase inhibitors, as most characterized DNA nucleases require a divalent metal ion for catalysis and are thus inhibited by chelating agents (Jarrett, J. Chromatogr., 1993, 618, 315-339). Suitable chelating agents include but are not limited to disodium ethylenediaminetetraacetate (EDTA), citric acid, salicylates (e.g., sodium salicylate, 5-methoxysalicylate and homovanilate), N-acyl derivatives of collagen, laureth-9 and N-amino acyl derivatives of beta-diketones (enamines)(Lee et al., Critical Reviews in Therapeutic Drug Carrier Systems, 1991, page 92; Muranishi, Critical Reviews in Therapeutic Drug Carrier Systems, 1990, 7, 1-33; Buur et al., J. Control Rel., 1990, 14, 43-51).

[0322] Non-chelating non-surfactants: As used herein, non-chelating non-surfactant penetration enhancing compounds can be defined as compounds that demonstrate insignificant activity as chelating agents or as surfactants but that nonetheless enhance absorption of dsRNAs through the alimentary mucosa (Muranishi, Critical Reviews in Therapeutic Drug Carrier Systems, 1990, 7, 1-33). This class of penetration enhancers includes, for example, unsaturated cyclic ureas, 1-alkyl- and 1-alkenylazacyclo-alkanone derivatives (Lee et al., Critical Reviews in Therapeutic Drug Carrier Systems, 1991, page 92); and non-steroidal anti-inflammatory agents such as diclofenac sodium, indomethacin and phenylbutazone (Yamashita et al., J. Pharm. Pharmacol., 1987, 39, 621-626).

[0323] Agents that enhance uptake of dsRNAs at the cellular level may also be added to the pharmaceutical and other compositions of the present invention. For example, cationic lipids, such as lipofectin (Junichi et al, U.S. Pat. No. 5,705,188), cationic glycerol derivatives, and polycationic molecules, such as polylysine (Lollo et al., PCT Application WO 97/30731), are also known to enhance the cellular uptake of dsRNAs.

[0324] Other agents may be utilized to enhance the penetration of the administered nucleic acids, including glycols such as ethylene glycol and propylene glycol, pyrrols such as 2-pyrrol, azones, and terpenes such as limonene and menthone.

[0325] Carriers

[0326] dsRNAs of the present invention can be formulated in a pharmaceutically acceptable carrier or diluent. A “pharmaceutically acceptable carrier” (also referred to herein as an “excipient”) is a pharmaceutically acceptable solvent, suspending agent, or any other pharmacologically inert vehicle. Pharmaceutically acceptable carriers can be liquid or solid, and can be selected with the planned manner of administration in mind so as to provide for the desired bulk, consistency, and other pertinent transport and chemical properties. Typical pharmaceutically acceptable carriers include, by way of example and not limitation: water; saline solution; binding agents (e.g., polyvinylpyrrolidone or hydroxypropyl methylcellulose); fillers (e.g., lactose and other sugars, gelatin, or calcium sulfate); lubricants (e.g., starch, polyethylene glycol, or sodium acetate); disintegrates (e.g., starch or sodium starch glycolate); and wetting agents (e.g., sodium lauryl sulfate).

[0327] Certain compositions of the present invention also incorporate carrier compounds in the formulation. As used herein, “carrier compound” or “carrier” can refer to a nucleic acid, or analog thereof, which is inert (i.e., does not possess biological activity per se) but is recognized as a nucleic acid by in vivo processes that reduce the bioavailability of a nucleic acid having biological activity by, for example, degrading the biologically active nucleic acid or promoting its removal from circulation. The co-administration of a nucleic acid and a carrier compound, typically with an excess of the latter substance, can result in a substantial reduction of the amount of nucleic acid recovered in the liver, kidney or other extra-circulatory reservoirs, presumably due to competition between the carrier compound and the nucleic acid for a common receptor. For example, the recovery of a partially phosphorothioate dsRNA in hepatic tissue can be reduced when it is co-administered with polyinosinic acid, dextran sulfate, polycytidic acid or 4-acetamido-4′isothiocyano-stilbene-2,2′-disulfonic acid (Miyao et al., DsRNA Res. Dev., 1995, 5, 115-121; Takakura et al., DsRNA & Nucl. Acid Drug Dev., 1996, 6, 177-183.

[0328] Excipients

[0329] In contrast to a carrier compound, a “pharmaceutical carrier” or “excipient” is a pharmaceutically acceptable solvent, suspending agent or any other pharmacologically inert vehicle for delivering one or more nucleic acids to an animal. The excipient may be liquid or solid and is selected, with the planned manner of administration in mind, so as to provide for the desired bulk, consistency, etc., when combined with a nucleic acid and the other components of a given pharmaceutical composition. Typical pharmaceutical carriers include, but are not limited to, binding agents (e.g., pregelatinized maize starch, polyvinylpyrrolidone or hydroxypropyl methylcellulose, etc.); fillers (e.g., lactose and other sugars, microcrystalline cellulose, pectin, gelatin, calcium sulfate, ethyl cellulose, polyacrylates or calcium hydrogen phosphate, etc.); lubricants (e.g., magnesium stearate, talc, silica, colloidal silicon dioxide, stearic acid, metallic stearates, hydrogenated vegetable oils, corn starch, polyethylene glycols, sodium benzoate, sodium acetate, etc.); disintegrants (e.g., starch, sodium starch glycolate, etc.); and wetting agents (e.g., sodium lauryl sulphate, etc).

[0330] Pharmaceutically acceptable organic or inorganic excipients suitable for non-parenteral administration which do not deleteriously react with nucleic acids can also be used to formulate the compositions of the present invention. Suitable pharmaceutically acceptable carriers include, but are not limited to, water, salt solutions, alcohols, polyethylene glycols, gelatin, lactose, amylose, magnesium stearate, talc, silicic acid, viscous paraffin, hydroxymethylcellulose, polyvinylpyrrolidone and the like.

[0331] Formulations for topical administration of nucleic acids may include sterile and non-sterile aqueous solutions, non-aqueous solutions in common solvents such as alcohols, or solutions of the nucleic acids in liquid or solid oil bases. The solutions may also contain buffers, diluents and other suitable additives. Pharmaceutically acceptable organic or inorganic excipients suitable for non-parenteral administration which do not deleteriously react with nucleic acids can be used.

[0332] Suitable pharmaceutically acceptable excipients include, but are not limited to, water, salt solutions, alcohol, polyethylene glycols, gelatin, lactose, amylose, magnesium stearate, talc, silicic acid, viscous paraffin, hydroxymethylcellulose, polyvinylpyrrolidone and the like.

[0333] Other Components

[0334] The compositions of the present invention may additionally contain other adjunct components conventionally found in pharmaceutical compositions, at their art-established usage levels. Thus, for example, the compositions may contain additional, compatible, pharmaceutically-active materials such as, for example, antipruritics, astringents, local anesthetics or anti-inflammatory agents, or may contain additional materials useful in physically formulating various dosage forms of the compositions of the present invention, such as dyes, flavoring agents, preservatives, antioxidants, opacifiers, thickening agents and stabilizers. However, such materials, when added, should not unduly interfere with the biological activities of the components of the compositions of the present invention. The formulations can be sterilized and, if desired, mixed with auxiliary agents, e.g., lubricants, preservatives, stabilizers, wetting agents, emulsifiers, salts for influencing osmotic pressure, buffers, colorings, flavorings and/or aromatic substances and the like which do not deleteriously interact with the nucleic acid(s) of the formulation.

[0335] Aqueous suspensions may contain substances which increase the viscosity of the suspension including, for example, sodium carboxymethylcellulose, sorbitol and/or dextran. The suspension may also contain stabilizers.

[0336] Combination Therapy

[0337] In one aspect, a composition of the invention can be used in combination therapy. The term “combination therapy” includes the administration of the subject compounds in further combination with other biologically active ingredients (such as, but not limited to, a second and different antineoplastic agent) and non-drug therapies (such as, but not limited to, surgery or radiation treatment). For instance, the compounds of the invention can be used in combination with other pharmaceutically active compounds, preferably compounds that are able to enhance the effect of the compounds of the invention. The compounds of the invention can be administered simultaneously (as a single preparation or separate preparation) or sequentially to the other drug therapy. In general, a combination therapy envisions administration of two or more drugs during a single cycle or course of therapy.

[0338] In one aspect of the invention, the subject compounds may be administered in combination with one or more separate agents that modulate protein kinases involved in various disease states. Examples of such kinases may include, but are not limited to: serine/threonine specific kinases, receptor tyrosine specific kinases and non-receptor tyrosine specific kinases. Serine/threonine kinases include mitogen activated protein kinases (MAPK), meiosis specific kinase (MEK), RAF and aurora kinase. Examples of receptor kinase families include epidermal growth factor receptor (EGFR) (e.g., HER2/neu, HER3, HERO, ErbB, ErbB2, ErbB3, ErbB4, Xmrk, DER, Let23); fibroblast growth factor (FGF) receptor (e.g. FGF-R1, GFF-R2/BEK/CEK3, FGF-R3/CEK2, FGF-R4/TKF, KGF-R); hepatocyte growth/scatter factor receptor (HGFR) (e.g., MET, RON, SEA, SEX); insulin receptor (e.g. IGFI-R); Eph (e.g. CEKS, CEK8, EBK, ECK, EEK, EHK-I, EHK-2, ELK, EPH, ERK, HEK, MDK2, MDKS, SEK); AxI (e.g. Mer/Nyk, Rse); RET; and platelet-derived growth factor receptor (PDGFR) (e.g. PDGFα-R, PDGβ-R, CSF1-R/FMS, SCF-R/C-KIT, VEGF-R/FLT, NEK/FLK1, FLT3/FLK2/STK-1). Non-receptor tyrosine kinase families include, but are not limited to, BCR-ABL (e.g. p43^{abl} ARG); BTK (e.g. ITK/EMT, TEC); CSK, FAK, FPS, JAK, SRC, BMX, FER, CDK and SYK.

[0339] In another aspect of the invention, the subject compounds may be administered in combination with one or more agents that modulate non-kinase biological targets or processes. Such targets include histone deacetylases (HDAC), DNA methyltransferase (DNMT), heat shock proteins (e.g., HSP90), and proteosomes.

[0340] In one embodiment, subject compounds may be combined with antineoplastic agents (e.g. small molecules, monoclonal antibodies, antisense RNA, and fusion proteins) that inhibit one or more biological targets such as Zolinza, Tarceva, Iressa, Tykerb, Gleevec, Sutent, Sprycel, Nexavar, Sorafenib, CNF2024, RG108, BMS387032, Affmitak, Avastin, Herceptin, Erbitux, AG24322, PD325901, ZD6474, PD 184322, Obatodax, ABT737 and AEE788. Such combinations may enhance therapeutic efficacy over efficacy achieved by any of the agents alone and may prevent or delay the appearance of resistant mutational variants.

[0341] In certain preferred embodiments, the compounds of the invention are administered in combination with a chemotherapeutic agent. Chemotherapeutic agents encompass a wide range of therapeutic treatments in the field of oncology. These agents are administered at various stages of the disease for the purposes of shrinking tumors, destroying remaining cancer cells left over after surgery, inducing remission, maintaining remission and/or alleviating symptoms relating to the cancer or its treatment. Examples of such agents include, but are not limited to, alkylating agents such as mustard gas derivatives (Mechlorethamine, cylophosphamide, chlorambucil, melphalan, ifosfamide), ethylenimines (thiotepa, hexamethylmelanine), Alkylsulfonates (Busulfan), Hydrazines and Triazines (Altretamine, Procarbazine, Dacarbazine and Temozolomide), Nitrosoureas (Carmustine, Lomustine and Streptozocin), Ifosfamide and metal salts (Carboplatin, Cisplatin, and Oxaliplatin); plant alkaloids such as Podophyllotoxins (Etoposide and Tenisopide), Taxanes (Paclitaxel and Docetaxel), Vinca alkaloids (Vincristine, Vinblastine, Vindesine and Vinorelbine), and Camptothecan analogs (Irinotecan and Topotecan); anti-tumor antibiotics such as Chromomycins (Dactinomycin and Plicamycin), Anthracyclines (Doxorubicin, Daunorubicin, Epirubicin, Mitoxantrone, Valrubicin and Idarubicin), and miscellaneous antibiotics such as Mitomycin, Actinomycin and Bleomycin; anti-metabolites such as folic acid antagonists (Methotrexate, Pemetrexed, Raltitrexed, Aminopterin), pyrimidine antagonists (5-Fluorouracil, Floxuridine, Cytarabine, Capecitabine, and Gemcitabine), purine antagonists (6-Mercaptopurine and 6-Thioguanine) and adenosine deaminase inhibitors (Cladribine, Fludarabine, Mercaptopurine, Clofarabine, Thioguanine, Nelarabine and Pentostatin); topoisomerase inhibitors such as topoisomerase I inhibitors (Ironotecan, topotecan) and topoisomerase II inhibitors (Amsacrine, etoposide, etoposide phosphate, teniposide); monoclonal antibodies (Alemtuzumab, Gemtuzumab ozogamicin, Rituximab, Trastuzumab, Ibritumomab Tioxetan, Cetuximab, Panitumumab, Tositumomab, Bevacizumab); and miscellaneous anti-neoplasties such as ribonucleotide reductase inhibitors (Hydroxyurea); adrenocortical steroid inhibitor (Mitotane); enzymes (Asparaginase and Pegaspargase); anti-microtubule agents (Estramustine); and retinoids (Bexarotene, Isotretinoin, Tretinoin (ATRA). In certain preferred embodiments, the compounds of the invention are administered in combination with a chemoprotective agent. Chemoprotective agents act to protect the body or minimize the side effects of chemotherapy. Examples of such agents include, but are not limited to, amfostine, mesna, and dexrazoxane.

[0342] In one aspect of the invention, the subject compounds are administered in combination with radiation therapy. Radiation is commonly delivered internally (implantation of radioactive material near cancer site) or externally from a machine that employs photon (x-ray or gamma-ray) or particle radiation. Where the combination therapy further comprises radiation treatment, the radiation treatment may be conducted at any suitable time so long as a beneficial effect from the co-action of the combination of the therapeutic agents and radiation treatment is achieved. For example, in appropriate cases, the beneficial effect is still achieved when the radiation treatment is temporally removed from the administration of the therapeutic agents, perhaps by days or even weeks.

[0343] It will be appreciated that compounds of the invention can be used in combination with an immunotherapeutic agent. One form of immunotherapy is the generation of an active systemic tumor-specific immune response of host origin by administering a vaccine composition at a site distant from the tumor. Various types of vaccines have been proposed, including isolated tumor-antigen vaccines and anti-idiotype vaccines. Another approach is to use tumor cells from the subject to be treated, or a derivative of such cells (reviewed by Schirrmacher et al. (1995) J. Cancer Res. Clin. Oncol. 121:487). In U.S. Pat. No. 5,484,596, Hanna Jr. et al. claim a method for treating a resectable carcinoma to prevent recurrence or metastases, comprising surgically removing the tumor, dispersing the cells with collagenase, irradiating the cells, and vaccinating the patient with at least three consecutive doses of about 10⁷ cells.

[0344] It will be appreciated that the compounds of the invention may advantageously be used in conjunction with one or more adjunctive therapeutic agents. Examples of suitable agents for adjunctive therapy include steroids, such as corticosteroids (amcinonide, betamethasone, betamethasone dipropionate, betamethasone valerate, budesonide, clobetasol, clobetasol acetate, clobetasol butyrate, clobetasol 17-propionate, cortisone, deflazacort, desoximetasone, diflucortolone valerate, dexamethasone, dexamethasone sodium phosphate, desonide, furoate, fluocinonide, fluocinolone acetonide, halcinonide, hydrocortisone, hydrocortisone butyrate, hydrocortisone sodium succinate, hydrocortisone valerate, methyl prednisolone, mometasone, prednicarbate, prednisolone, triamcinolone, triamcinolone acetonide, and halobetasol proprionate); a SHTi agonist, such as a triptan (e.g. sumatriptan or naratriptan); an adenosine A1 agonist; an EP ligand; an NMDA modulator, such as a glycine antagonist; a sodium channel blocker (e.g. lamotrigine); a substance P antagonist (e.g. an NKi antagonist); a cannabinoid; acetaminophen or phenacetin; a 5-lipoxygenase inhibitor; a leukotriene receptor antagonist; a DMARD (e.g. methotrexate); gabapentin and related compounds; a tricyclic antidepressant (e.g. amitryptilline); a neurone stabilizing antiepileptic drug; a mono-aminergic uptake inhibitor (e.g. venlafaxine); a matrix metalloproteinase inhibitor; a nitric oxide synthase (NOS) inhibitor, such as an iNOS or an nNOS inhibitor; an inhibitor of the release, or action, of tumour necrosis factor α; an antibody therapy, such as a monoclonal antibody therapy; an antiviral agent, such as a nucleoside inhibitor (e.g. lamivudine) or an immune system modulator (e.g. interferon); an opioid analgesic; a local anaesthetic; a stimulant, including caffeine; an H2-antagonist (e.g. ranitidine); a proton pump inhibitor (e.g. omeprazole); an antacid (e.g. aluminium or magnesium hydroxide; an antiflatulent (e.g. simethicone); a decongestant (e.g. phenylephrine, phenylpropanolamine, pseudoephedrine, oxymetazoline, epinephrine, naphazoline, xylometazoline, propylhexedrine, or levo-desoxyephedrine); an antitussive (e.g. codeine, hydrocodone, carmiphen, carbetapentane, or dextramethorphan); a diuretic; or a sedating or non-sedating antihistamine.

[0345] The compounds of the invention can be co-administered with siRNA that target other genes. For example, a compound of the invention can be co-administered with an siRNA targeted to a c-Myc gene. In one example, AD-12115 can be co-administered with a c-Myc siRNA. Examples of c-Myc targeted siRNAs are disclosed in U.S. patent application Ser. No. 12/373,039 which is herein incorporated by reference.

[0346] Methods of Preparing Lipid Particles

[0347] The methods and compositions of the invention make use of certain cationic lipids, the synthesis, preparation and characterization of which is described below and in the accompanying Examples. In addition, the present invention provides methods of preparing lipid particles, including those associated with a therapeutic agent, e.g., a nucleic acid. In the methods described herein, a mixture of lipids is combined with a buffered aqueous solution of nucleic acid to produce an intermediate mixture containing nucleic acid encapsulated in lipid particles wherein the encapsulated nucleic acids are present in a nucleic acid/lipid ratio of about 3 wt % to about 25 wt %, preferably 5 to 15 wt %. The intermediate mixture may optionally be sized to obtain lipid-encapsulated nucleic acid particles wherein the lipid portions are unilamellar vesicles, preferably having a diameter of 30 to 150 nm, more preferably about 40 to 90 nm. The pH is then raised to neutralize at least a portion of the surface charges on the lipid-nucleic acid particles, thus providing an at least partially surface-neutralized lipid-encapsulated nucleic acid composition.

[0348] As described above, several of these cationic lipids are amino lipids that are charged at a pH below the pKₐ of the amino group and substantially neutral at a pH above the pKₐ. These cationic lipids are termed titratable cationic lipids and can be used in the formulations of the invention using a two-step process. First, lipid vesicles can be formed at the lower pH with titratable cationic lipids and other vesicle components in the presence of nucleic acids. In this manner, the vesicles will encapsulate and entrap the nucleic acids. Second, the surface charge of the newly formed vesicles can be neutralized by increasing the pH of the medium to a level above the pKₐ of the titratable cationic lipids present, i.e., to physiological pH or higher. Particularly advantageous aspects of this process include both the facile removal of any surface adsorbed nucleic acid and a resultant nucleic acid delivery vehicle which has a neutral surface. Liposomes or lipid particles having a neutral surface are expected to avoid rapid clearance from circulation and to avoid certain toxicities which are associated with cationic liposome preparations. Additional details concerning these uses of such titratable cationic lipids in the formulation of nucleic acid-lipid particles are provided in U.S. Pat. No. 6,287,591 and U.S. Pat. No. 6,858,225, incorporated herein by reference.

[0349] It is further noted that the vesicles formed in this manner provide formulations of uniform vesicle size with high content of nucleic acids. Additionally, the vesicles have a size range of from about 30 to about 150 nm, more preferably about 30 to about 90 nm.

[0350] Without intending to be bound by any particular theory, it is believed that the very high efficiency of nucleic acid encapsulation is a result of electrostatic interaction at low pH. At acidic pH (e.g. pH 4.0) the vesicle surface is charged and binds a portion of the nucleic acids through electrostatic interactions. When the external acidic buffer is exchanged for a more neutral buffer (e.g., pH 7.5) the surface of the lipid particle or liposome is neutralized, allowing any external nucleic acid to be removed. More detailed information on the formulation process is provided in various publications (e.g., U.S. Pat. No. 6,287,591 and U.S. Pat. No. 6,858,225).

[0351] In view of the above, the present invention provides methods of preparing lipid/nucleic acid formulations. In the methods described herein, a mixture of lipids is combined with a buffered aqueous solution of nucleic acid to produce an intermediate mixture containing nucleic acid encapsulated in lipid particles, e.g., wherein the encapsulated nucleic acids are present in a nucleic acid/lipid ratio of about 10 wt % to about 20 wt %. The intermediate mixture may optionally be sized to obtain lipid-encapsulated nucleic acid particles wherein the lipid portions are unilamellar vesicles, preferably having a diameter of 30 to 150 nm, more preferably about 40 to 90 nm. The pH is then raised to neutralize at least a portion of the surface charges on the lipid-nucleic acid particles, thus providing an at least partially surface-neutralized lipid-encapsulated nucleic acid composition.

[0352] In certain embodiments, the mixture of lipids includes at least two lipid components: a first amino lipid component of the present invention that is selected from among lipids which have a pKa such that the lipid is cationic at pH below the pKa and neutral at pH above the pKa, and a second lipid component that is selected from among lipids that prevent particle aggregation during lipid-nucleic acid particle formation. In particular embodiments, the amino lipid is a novel cationic lipid of the present invention.

[0353] In preparing the nucleic acid-lipid particles of the invention, the mixture of lipids is typically a solution of lipids in an organic solvent. This mixture of lipids can then be dried to form a thin film or lyophilized to form a powder before being hydrated with an aqueous buffer to form liposomes. Alternatively, in a preferred method, the lipid mixture can be solubilized in a water miscible alcohol, such as ethanol, and this ethanolic solution added to an aqueous buffer resulting in spontaneous liposome formation. In most embodiments, the alcohol is used in the form in which it is commercially available. For example, ethanol can be used as absolute ethanol (100%), or as 95% ethanol, the remainder being water. This method is described in more detail in U.S. Pat. No. 5,976,567).

[0354] In accordance with the invention, the lipid mixture is combined with a buffered aqueous solution that may contain the nucleic acids. The buffered aqueous solution of is typically a solution in which the buffer has a pH of less than the pKₐ of the protonatable lipid in the lipid mixture. Examples of suitable buffers include citrate, phosphate, acetate, and MES. A particularly preferred buffer is citrate buffer. Preferred buffers will be in the range of 1-1000 mM of the anion, depending on the chemistry of the nucleic acid being encapsulated, and optimization of buffer concentration may be significant to achieving high loading levels (see, e.g., U.S. Pat. No. 6,287,591 and U.S. Pat. No. 6,858,225). Alternatively, pure water acidified to pH 5-6 with chloride, sulfate or the like may be useful. In this case, it may be suitable to add 5% glucose, or another non-ionic solute which will balance the osmotic potential across the particle membrane when the particles are dialyzed to remove ethanol, increase the pH, or mixed with a pharmaceutically acceptable carrier such as normal saline. The amount of nucleic acid in buffer can vary, but will typically be from about 0.01 mg/mL to about 200 mg/mL, more preferably from about 0.5 mg/mL to about 50 mg/mL.

[0355] The mixture of lipids and the buffered aqueous solution of therapeutic nucleic acids is combined to provide an intermediate mixture. The intermediate mixture is typically a mixture of lipid particles having encapsulated nucleic acids. Additionally, the intermediate mixture may also contain some portion of nucleic acids which are attached to the surface of the lipid particles (liposomes or lipid vesicles) due to the ionic attraction of the negatively-charged nucleic acids and positively-charged lipids on the lipid particle surface (the amino lipids or other lipid making up the protonatable first lipid component are positively charged in a buffer having a pH of less than the pKₐ of the protonatable group on the lipid). In one group of preferred embodiments, the mixture of lipids is an alcohol solution of lipids and the volumes of each of the solutions are adjusted so that upon combination, the resulting alcohol content is from about 20% by volume to about 45% by volume. The method of combining the mixtures can include any of a variety of processes, often depending upon the scale of formulation produced. For example, when the total volume is about 10-20 mL or less, the solutions can be combined in a test tube and stirred together using a vortex mixer. Large-scale processes can be carried out in suitable production scale glassware.

[0356] Optionally, the lipid-encapsulated therapeutic agent (e.g., nucleic acid) complexes which are produced by combining the lipid mixture and the buffered aqueous solution of therapeutic agents (nucleic acids) can be sized to achieve a desired size range and relatively narrow distribution of lipid particle sizes. Preferably, the compositions provided herein will be sized to a mean diameter of from about 70 to about 200 nm, more preferably about 90 to about 130 nm. Several techniques are available for sizing liposomes to a desired size. One sizing method is described in U.S. Pat. No. 4,737,323, incorporated herein by reference. Sonicating a liposome suspension either by bath or probe sonication produces a progressive size reduction down to small unilamellar vesicles (SUVs) less than about 0.05 microns in size. Homogenization is another method which relies on shearing energy to fragment large liposomes into smaller ones. In a typical homogenization procedure, multilamellar vesicles are recirculated through a standard emulsion homogenizer until selected liposome sizes, typically between about 0.1 and 0.5 microns, are observed. In both methods, the particle size distribution can be monitored by conventional laser-beam particle size determination. For certain methods herein, extrusion is used to obtain a uniform vesicle size.

[0357] Extrusion of liposome compositions through a small-pore polycarbonate membrane or an asymmetric ceramic membrane results in a relatively well-defined size distribution. Typically, the suspension is cycled through the membrane one or more times until the desired liposome complex size distribution is achieved. The liposomes may be extruded through successively smaller-pore membranes, to achieve a gradual reduction in liposome size. In some instances, the lipid-nucleic acid compositions which are formed can be used without any sizing.

[0358] In particular embodiments, methods of the present invention further comprise a step of neutralizing at least some of the surface charges on the lipid portions of the lipid-nucleic acid compositions. By at least partially neutralizing the surface charges, unencapsulated nucleic acid is freed from the lipid particle surface and can be removed from the composition using conventional techniques. Preferably, unencapsulated and surface adsorbed nucleic acids are removed from the resulting compositions through exchange of buffer solutions. For example, replacement of a citrate buffer (pH about 4.0, used for forming the compositions) with a HEPES-buffered saline (HBS pH about 7.5) solution, results in the neutralization of liposome surface and nucleic acid release from the surface. The released nucleic acid can then be removed via chromatography using standard methods, and then switched into a buffer with a pH above the pKa of the lipid used.

[0359] Optionally the lipid vesicles (i.e., lipid particles) can be formed by hydration in an aqueous buffer and sized using any of the methods described above prior to addition of the nucleic acid. As described above, the aqueous buffer should be of a pH below the pKa of the amino lipid. A solution of the nucleic acids can then be added to these sized, preformed vesicles. To allow encapsulation of nucleic acids into such “pre-formed” vesicles the mixture should contain an alcohol, such as ethanol. In the case of ethanol, it should be present at a concentration of about 20% (w/w) to about 45% (w/w). In addition, it may be necessary to warm the mixture of pre-formed vesicles and nucleic acid in the aqueous buffer-ethanol mixture to a temperature of about 25° C. to about 50° C. depending on the composition of the lipid vesicles and the nature of the nucleic acid. It will be apparent to one of ordinary skill in the art that optimization of the encapsulation process to achieve a desired level of nucleic acid in the lipid vesicles will require manipulation of variable such as ethanol concentration and temperature. Examples of suitable conditions for nucleic acid encapsulation are provided in the Examples. Once the nucleic acids are encapsulated within the preformed vesicles, the external pH can be increased to at least partially neutralize the surface charge. Unencapsulated and surface adsorbed nucleic acids can then be removed as described above.

[0360] Methods for Inhibiting Expression of the PCSK9 Gene

[0361] In yet another aspect, the invention provides a method for inhibiting the expression of the PCSK9 gene in a mammal. The method includes administering a composition of the invention to the mammal such that expression of the target PCSK9 gene is decreased for an extended duration, e.g., at least one week, two weeks, three weeks, or four weeks or longer.

[0362] For example, in certain instances, expression of the PCSK9 gene is suppressed by at least about 5%, 10%, 15%, 20%, 25%, 30%, 35%, 40%, 45%, or 50% by administration of a double-stranded oligonucleotide described herein. In some embodiments, the PCSK9 gene is suppressed by at least about 60%, 70%, or 80% by administration of the double-stranded oligonucleotide. In some embodiments, the PCSK9 gene is suppressed by at least about 85%, 90%, or 95% by administration of the double-stranded oligonucleotide. Table 1b, Table 2b, and Table 5b provide a wide range of values for inhibition of expression obtained in an in vitro assay using various PCSK9 dsRNA molecules at various concentrations.

[0363] The effect of the decreased target PCSK9 gene preferably results in a decrease in LDLc (low density lipoprotein cholesterol) levels in the blood, and more particularly in the serum, of the mammal. In some embodiments, LDLc levels are decreased by at least 10%, 15%, 20%, 25%, 30%, 40%, 50%, or 60%, or more, as compared to pretreatment levels.

[0364] The method includes administering a composition containing a dsRNA, where the dsRNA has a nucleotide sequence that is complementary to at least a part of an RNA transcript of the PCSK9 gene of the mammal to be treated. When the organism to be treated is a mammal such as a human, the composition can be administered by any means known in the art including, but not limited to oral or parenteral routes, including intravenous, intramuscular, subcutaneous, transdermal, and airway (aerosol) administration. In some embodiments, the compositions are administered by intravenous infusion or injection.

[0365] The methods and compositions described herein can be used to treat diseases and conditions that can be modulated by down regulating PCSK9 gene expression. For example, the compositions described herein can be used to treat hyperlipidemia and other forms of lipid imbalance such as hypercholesterolemia, hypertriglyceridemia and the pathological conditions associated with these disorders such as heart and circulatory diseases. In some embodiments, a patient treated with a PCSK9 dsRNA is also administered a non-dsRNA therapeutic agent, such as an agent known to treat lipid disorders.

[0366] In one aspect, the invention provides a method of inhibiting the expression of the PCSK9 gene in a subject, e.g., a human. The method includes administering a first single dose of dsRNA, e.g., a dose sufficient to depress levels of PCSK9 mRNA for at least 5, more preferably 7, 10, 14, 21, 25, 30 or 40 days; and optionally, administering a second single dose of dsRNA, wherein the second single dose is administered at least 5, more preferably 7, 10, 14, 21, 25, 30 or 40 days after the first single dose is administered, thereby inhibiting the expression of the PCSK9 gene in a subject.

[0367] In one embodiment, doses of dsRNA are administered not more than once every four weeks, not more than once every three weeks, not more than once every two weeks, or not more than once every week. In another embodiment, the administrations can be maintained for one, two, three, or six months, or one year or longer.

[0368] In another embodiment, administration can be provided when Low Density Lipoprotein cholesterol (LDLc) levels reach or surpass a predetermined minimal level, such as greater than 70 mg/dL, 130 mg/dL, 150 mg/dL, 200 mg/dL, 300 mg/dL, or 400 mg/dL.

[0369] In one embodiment, the subject is selected, at least in part, on the basis of needing (as opposed to merely selecting a patient on the grounds of who happens to be in need of) LDL lowering, LDL lowering without lowering of HDL, ApoB lowering, or total cholesterol lowering without HDL lowering.

[0370] In one embodiment, the dsRNA does not activate the immune system, e.g., it does not increase cytokine levels, such as TNF-alpha or IFN-alpha levels. For example, when measured by an assay, such as an in vitro PBMC assay, such as described herein, the increase in levels of TNF-alpha or IFN-alpha, is less than 30%, 20%, or 10% of control cells treated with a control dsRNA, such as a dsRNA that does not target PCSK9.

[0371] In one aspect, the invention provides a method for treating, preventing or managing a disorder, pathological process or symptom, which, for example, can be mediated by down regulating PCSK9 gene expression in a subject, such as a human subject. In one embodiment, the disorder is hyperlipidemia. The method includes administering a first single dose of dsRNA, e.g., a dose sufficient to depress levels of PCSK9 mRNA for at least 5, more preferably 7, 10, 14, 21, 25, 30 or 40 days; and optionally, administering a second single dose of dsRNA, wherein the second single dose is administered at least 5, more preferably 7, 10, 14, 21, 25, 30 or 40 days after the first single dose is administered, thereby inhibiting the expression of the PCSK9 gene in a subject.

[0372] In another embodiment, a composition containing a dsRNA featured in the invention, i.e., a dsRNA targeting PCSK9, is administered with a non-dsRNA therapeutic agent, such as an agent known to treat a lipid disorders, such as hypercholesterolemia, atherosclerosis or dyslipidemia. For example, a dsRNA featured in the invention can be administered with, e.g., an HMG-CoA reductase inhibitor (e.g., a statin), a fibrate, a bile acid sequestrant, niacin, an antiplatelet agent, an angiotensin converting enzyme inhibitor, an angiotensin II receptor antagonist (e.g., losartan potassium, such as Merck & Co.'s Cozaar®), an acylCoA cholesterol acetyltransferase (ACAT) inhibitor, a cholesterol absorption inhibitor, a cholesterol ester transfer protein (CETP) inhibitor, a microsomal triglyceride transfer protein (MTTP) inhibitor, a cholesterol modulator, a bile acid modulator, a peroxisome proliferation activated receptor (PPAR) agonist, a gene-based therapy, a composite vascular protectant (e.g., AGI-1067, from Atherogenics), a glycoprotein IIb/IIIa inhibitor, aspirin or an aspirin-like compound, an IBAT inhibitor (e.g., S-8921, from Shionogi), a squalene synthase inhibitor, or a monocyte chemoattractant protein (MCP)-I inhibitor. Exemplary HMG-CoA reductase inhibitors include atorvastatin (Pfizer's Lipitor®/Tahor/Sortis/Torvast/Cardyl), pravastatin (Bristol-Myers Squibb's Pravachol, Sankyo's Mevalotin/Sanaprav), simvastatin (Merck's Zocor®/Sinvacor, Boehringer Ingelheim's Denan, Banyu's Lipovas), lovastatin (Merck's Mevacor/Mevinacor, Bexal's Lovastatina, Cepa; Schwarz Pharma's Liposcler), fluvastatin (Novartis' Lescol®/Locol/Lochol, Fujisawa's Cranoc, Solvay's Digaril), cerivastatin (Bayer's Lipobay/GlaxoSmithKline's Baycol), rosuvastatin (AstraZeneca's Crestor®), and pitivastatin (itavastatin/risivastatin) (Nissan Chemical, Kowa Kogyo, Sankyo, and Novartis). Exemplary fibrates include, e.g., bezafibrate (e.g., Roche's Befizal®/Cedur®/Bezalip®, Kissei's Bezatol), clofibrate (e.g., Wyeth's Atromid-S®), fenofibrate (e.g., Fournier's Lipidil/Lipantil, Abbott's Tricor®, Takeda's Lipantil, generics), gemfibrozil (e.g., Pfizer's Lopid/Lipur) and ciprofibrate (Sanofi-Synthelabo's Modalim®). Exemplary bile acid sequestrants include, e.g., cholestyramine (Bristol-Myers Squibb's Questran® and Questran Light™), colestipol (e.g., Pharmacia's Colestid), and colesevelam (Genzyme/Sankyo's WelChol™). Exemplary niacin therapies include, e.g., immediate release formulations, such as Aventis' Nicobid, Upsher-Smith's Niacor, Aventis' Nicolar, and Sanwakagaku's Perycit. Niacin extended release formulations include, e.g., Kos Pharmaceuticals' Niaspan and Upsher-Smith's SIo-Niacin. Exemplary antiplatelet agents include, e.g., aspirin (e.g., Bayer's aspirin), clopidogrel (Sanofi-Synthelabo/Bristol-Myers Squibb's Plavix), and ticlopidine (e.g., Sanofi-Synthelabo's Ticlid and Daiichi's Panaldine). Other aspirin-like compounds useful in combination with a dsRNA targeting PCSK9 include, e.g., Asacard (slow-release aspirin, by Pharmacia) and Pamicogrel (Kanebo/Angelini Ricerche/CEPA). Exemplary angiotensin-converting enzyme inhibitors include, e.g., ramipril (e.g., Aventis' Altace) and enalapril (e.g., Merck & Co.'s Vasotec). Exemplary acyl CoA cholesterol acetyltransferase (ACAT) inhibitors include, e.g., avasimibe (Pfizer), eflucimibe (BioM\acute{ε}rieux Pierre Fabre/Eli Lilly), CS-505 (Sankyo and Kyoto), and SMP-797 (Sumito). Exemplary cholesterol absorption inhibitors include, e.g., ezetimibe (Merck/Schering-Plough Pharmaceuticals Zetia®) and Pamaqueside (Pfizer). Exemplary CETP inhibitors include, e.g., Torcetrapib (also called CP-529414, Pfizer), JTT-705 (Japan Tobacco), and CETi-I (Avant Immunotherapeutics). Exemplary microsomal triglyceride transfer protein (MTTP) inhibitors include, e.g., implitapide (Bayer), R-103757 (Janssen), and CP-346086 (Pfizer). Other exemplary cholesterol modulators include, e.g., NO-1886 (Otsuka/TAP Pharmaceutical), CI-1027 (Pfizer), and WAY-135433 (Wyeth-Ayerst). Exemplary bile acid modulators include, e.g., HBS-107 (Hisamitsu/Banyu), Btg-511 (British Technology Group), BARI-1453 (Aventis), S-8921 (Shionogi), SD-5613 (Pfizer), and AZD-7806 (AstraZeneca). Exemplary peroxisome proliferation activated receptor (PPAR) agonists include, e.g., tesaglitazar (AZ-242) (AstraZeneca), Netoglitazone (MCC-555) (Mitsubishi/Johnson & Johnson), GW-409544 (Ligand Pharniaceuticals/GlaxoSmithKline), GW-501516 (Ligand Pharmaceuticals/GlaxoSmithKline), LY-929 (Ligand Pharmaceuticals and Eli Lilly), LY-465608 (Ligand Pharmaceuticals and Eli Lilly), LY-518674 (Ligand Pharmaceuticals and Eli Lilly), and MK-767 (Merck and Kyorin). Exemplary gene-based therapies include, e.g., AdGWEGF121.10 (GenVec), ApoAl (UCB Pharma/Groupe Fournier), EG-004 (Trinam) (Ark Therapeutics), and ATP-binding cassette transporter-A1 (ABCA1) (CV Therapeutics/Incyte, Aventis, Xenon). Exemplary Glycoprotein Ilb/IIIa inhibitors include, e.g., roxifiban (also called DMP754, Bristol-Myers Squibb), Gantofiban (Merck KGaA/Yamanouchi), and Cromafiban (Millennium Pharmaceuticals). Exemplary squalene synthase inhibitors include, e.g., BMS-1884941 (Bristol-Myers Squibb), CP-210172 (Pfizer), CP-295697 (Pfizer), CP-294838 (Pfizer), and TAK-475 (Takeda). An exemplary MCP-I inhibitor is, e.g., RS-504393 (Roche Bioscience). The anti-atherosclerotic agent BO-653 (Chugai Pharmaceuticals), and the nicotinic acid derivative Nyclin (Yamanouchi Pharmacuticals) are also appropriate for administering in combination with a dsRNA featured in the invention. Exemplary combination therapies suitable for administration with a dsRNA targeting PCSK9 include, e.g., advicor (Niacin/lovastatin from Kos Pharmaceuticals), amlodipine/atorvastatin (Pfizer), and ezetimibe/simvastatin (e.g., Vytorin® 10/10, 10/20, 10/40, and 10/80 tablets by Merck/Schering-Plough Pharmaceuticals). Agents for treating hypercholesterolemia, and suitable for administration in combination with a dsRNA targeting PCSK9 include, e.g., lovastatin, niacin Altoprev® Extended-Release Tablets (Andrx Labs), lovastatin Caduet® Tablets (Pfizer), amlodipine besylate, atorvastatin calcium Crestor® Tablets (AstraZeneca), rosuvastatin calcium Lescol® Capsules (Novartis), fluvastatin sodium Lescol® (Reliant, Novartis), fluvastatin sodium Lipitor® Tablets (Parke-Davis), atorvastatin calcium Lofibra® Capsules (Gate), Niaspan Extended-Release Tablets (Kos), niacin Pravachol Tablets (Bristol-Myers Squibb), pravastatin sodium TriCor® Tablets (Abbott), fenofibrate Vytorin® 10/10 Tablets (Merck/Schering-Plough Pharmaceuticals), ezetimibe, simvastatin WelChol™ Tablets (Sankyo), colesevelam hydrochloride Zetia® Tablets (Schering), ezetimibe Zetia® Tablets (Merck/Schering-Plough Pharmaceuticals), and ezetimibe Zocor® Tablets (Merck).

[0373] In one embodiment, a dsRNA targeting PCSK9 is administered in combination with an ezetimibe/simvastatin combination (e.g., Vytorin® (Merck/Schering-Plough Pharmaceuticals)).

[0374] In one embodiment, the PCSK9 dsRNA is administered to the patient, and then the non-dsRNA agent is administered to the patient (or vice versa). In another embodiment, the PCSK9 dsRNA and the non-dsRNA therapeutic agent are administered at the same time.

[0375] In another aspect, the invention features, a method of instructing an end user, e.g., a caregiver or a subject, on how to administer a dsRNA described herein. The method includes, optionally, providing the end user with one or more doses of the dsRNA, and instructing the end user to administer the dsRNA on a regimen described herein, thereby instructing the end user.

[0376] In yet another aspect, the invention provides a method of treating a patient by selecting a patient on the basis that the patient is in need of LDL lowering, LDL lowering without lowering of HDL, ApoB lowering, or total cholesterol lowering. The method includes administering to the patient a dsRNA targeting PCSK9 in an amount sufficient to lower the patient's LDL levels or ApoB levels, e.g., without substantially lowering HDL levels.

[0377] In another aspect, the invention provides a method of treating a patient by selecting a patient on the basis that the patient is in need of lowered ApoB levels, and administering to the patient a dsRNA targeting PCSK9 in an amount sufficient to lower the patient's ApoB levels. In one embodiment, the amount of PCSK9 is sufficient to lower LDL levels as well as ApoB levels. In another embodiment, administration of the PCSK9 dsRNA does not affect the level of HDL cholesterol in the patient.

[0378] Unless otherwise defined, all technical and scientific terms used herein have the same meaning as commonly understood by one of ordinary skill in the art to which this invention belongs. Although methods and materials similar or equivalent to those described herein can be used in the practice or testing of the invention, suitable methods and materials are described below. All publications, patent applications, patents, and other references mentioned herein are incorporated by reference in their entirety. In case of conflict, the present specification, including definitions, will control. In addition, the materials, methods, and examples are illustrative only and not intended to be limiting.

### EXAMPLES

### Example 1

### Gene Walking of the PCSK9 Gene

[0379] siRNA Design was Carried Out to Identify in Two Separate Selections

[0380] a) siRNAs targeting PCSK9 human and either mouse or rat mRNA and

[0381] b) all human reactive siRNAs with predicted specificity to the target gene PCSK9.

[0382] mRNA sequences to human, mouse and rat PCSK9 were used: Human sequence NM_174936.2 was used as reference sequence during the complete siRNA selection procedure.

[0383] 19 mer stretches conserved in human and mouse, and human and rat PCSK9 mRNA sequences were identified in the first step, resulting in the selection of siRNAs cross-reactive to human and mouse, and siRNAs cross-reactive to human and rat targets

[0384] SiRNAs specifically targeting human PCSK9 were identified in a second selection. All potential 19mer sequences of human PCSK9 were extracted and defined as candidate target sequences. Sequences cross-reactive to human, monkey, and those cross-reactive to mouse, rat, human and monkey are all listed in Tables 1a and 2a. Chemically modified versions of those sequences and their activity in both in vitro and in vivo assays are also listed in Tables 1a and 2a. The data is described in the examples and in FIGS. 2-8.

[0385] In order to rank candidate target sequences and their corresponding siRNAs and select appropriate ones, their predicted potential for interacting with irrelevant targets (off-target potential) was taken as a ranking parameter. siRNAs with low off-target potential were defined as preferable and assumed to be more specific in vivo.

[0386] For predicting siRNA-specific off-target potential, the following assumptions were made:

[0387] 1) positions 2 to 9 (counting 5′ to 3′) of a strand (seed region) may contribute more to off-target potential than rest of sequence (non-seed and cleavage site region)

[0388] 2) positions 10 and 11 (counting 5′ to 3′) of a strand (cleavage site region) may contribute more to off-target potential than non-seed region

[0389] 3) positions 1 and 19 of each strand are not relevant for off-target interactions

[0390] 4) an off-target score can be calculated for each gene and each strand, based on complementarity of siRNA strand sequence to the gene's sequence and position of mismatches

[0391] 5) number of predicted off-targets as well as highest off-target score must be considered for off-target potential

[0392] 6) off-target scores are to be considered more relevant for off-target potential than numbers of off-targets

[0393] 7) assuming potential abortion of sense strand activity by internal modifications introduced, only off-target potential of antisense strand will be relevant

[0394] To identify potential off-target genes, 19mer candidate sequences were subjected to a homology search against publically available human mRNA sequences.

[0395] The following off-target properties for each 19mer input sequence were extracted for each off-target gene to calculate the off-target score:

[0396] Number of mismatches in non-seed region

[0397] Number of mismatches in seed region

[0398] Number of mismatches in cleavage site region

[0399] The off-target score was calculated for considering assumption 1 to 3 as follows:

Off-target score=number of seed mismatches*10+number of cleavage site mismatches*1.2+number of non-seed mismatches*1

[0400] The most relevant off-target gene for each siRNA corresponding to the input 19mer sequence was defined as the gene with the lowest off-target score. Accordingly, the lowest off-target score was defined as the relevant off-target score for each siRNA.

### Example 2

### dsRNA Synthesis

[0401] Source of Reagents

[0402] Where the source of a reagent is not specifically given herein, such reagent may be obtained from any supplier of reagents for molecular biology at a quality/purity standard for application in molecular biology.

[0403] siRNA Synthesis

[0404] Single-stranded RNAs were produced by solid phase synthesis on a scale of 1 μmole using an Expedite 8909 synthesizer (Applied Biosystems, Applera Deutschland GmbH, Darmstadt, Germany) and controlled pore glass (CPG, 500 Å, Proligo Biochemie GmbH, Hamburg, Germany) as solid support. RNA and RNA containing 2′-O-methyl nucleotides were generated by solid phase synthesis employing the corresponding phosphoramidites and 2′-O-methyl phosphoramidites, respectively (Proligo Biochemie GmbH, Hamburg, Germany). These building blocks were incorporated at selected sites within the sequence of the oligoribonucleotide chain using standard nucleoside phosphoramidite chemistry such as described in Current protocols in nucleic acid chemistry, Beaucage, S. L. et al. (Edrs.), John Wiley & Sons, Inc., New York, N.Y., USA. Phosphorothioate linkages were introduced by replacement of the iodine oxidizer solution with a solution of the Beaucage reagent (Chruachem Ltd, Glasgow, UK) in acetonitrile (1%). Further ancillary reagents were obtained from Mallinckrodt Baker (Griesheim, Germany).

[0405] Deprotection and purification of the crude oligoribonucleotides by anion exchange HPLC were carried out according to established procedures. Yields and concentrations were determined by UV absorption of a solution of the respective RNA at a wavelength of 260 nm using a spectral photometer (DU 640B, Beckman Coulter GmbH, Unterschleiβheim, Germany). Double stranded RNA was generated by mixing an equimolar solution of complementary strands in annealing buffer (20 mM sodium phosphate, pH 6.8; 100 mM sodium chloride), heated in a water bath at 85-90° C. for 3 minutes and cooled to room temperature over a period of 3-4 hours. The annealed RNA solution was stored at −20° C. until use.

[0406] Conjugated siRNAs

[0407] For the synthesis of 3′-cholesterol-conjugated siRNAs (herein referred to as -Chol-3′), an appropriately modified solid support was used for RNA synthesis. The modified solid support was prepared as follows:

### Diethyl-2-azabutane-1,4-dicarboxylate AA

[chemical structure]

[0409] A 4.7 M aqueous solution of sodium hydroxide (50 ml) was added into a stirred, ice-cooled solution of ethyl glycinate hydrochloride (32.19 g, 0.23 mole) in water (50 ml). Then, ethyl acrylate (23.1 g, 0.23 mole) was added and the mixture was stirred at room temperature until completion of the reaction was ascertained by TLC. After 19 h the solution was partitioned with dichloromethane (3×100 ml). The organic layer was dried with anhydrous sodium sulfate, filtered and evaporated. The residue was distilled to afford AA (28.8 g, 61%).

### 3-{Ethoxycarbonylmethyl-[6-(9H-fluoren-9-ylmethoxycarbonyl-amino)-hexanoyl]-amino}-propionic acid ethyl ester AB

[chemical structure]

[0411] Fmoc-6-amino-hexanoic acid (9.12 g, 25.83 mmol) was dissolved in dichloromethane (50 ml) and cooled with ice. Diisopropylcarbodiimde (3.25 g, 3.99 ml, 25.83 mmol) was added to the solution at 0° C. It was then followed by the addition of Diethyl-azabutane-1,4-dicarboxylate (5 g, 24.6 mmol) and dimethylamino pyridine (0.305 g, 2.5 mmol). The solution was brought to room temperature and stirred further for 6 h. Completion of the reaction was ascertained by TLC. The reaction mixture was concentrated under vacuum and ethyl acetate was added to precipitate diisopropyl urea. The suspension was filtered. The filtrate was washed with 5% aqueous hydrochloric acid, 5% sodium bicarbonate and water. The combined organic layer was dried over sodium sulfate and concentrated to give the crude product which was purified by column chromatography (50% EtOAC/Hexanes) to yield 11.87 g (88%) of AB.

### 3-[(6-Amino-hexanoyl)-ethoxycarbonylmethyl-amino]-propionic acid ethyl ester AC

[chemical structure]

[0413] 3-{Ethoxycarbonylmethyl-[6-(9H-fluoren-9-ylmethoxycarbonylamino)-hexanoyl]-amino}-propionic acid ethyl ester AB (11.5 g, 21.3 mmol) was dissolved in 20% piperidine in dimethylformamide at 0° C. The solution was continued stirring for 1 h. The reaction mixture was concentrated under vacuum, water was added to the residue, and the product was extracted with ethyl acetate. The crude product was purified by conversion into its hydrochloride salt.

### 3-({6-[17-(1,5-Dimethyl-hexyl)-10,13-dimethyl-2,3,4,7,8,9,10,11,12,13,14,15,16,17-tetradecahydro-1H-cyclopenta[a]phenanthren-3-yloxycarbonylamino]-hexanoyl}ethoxycarbonylmethyl-amino)-propionic acid ethyl ester AD

[chemical structure]

[0415] The hydrochloride salt of 3-[(6-Amino-hexanoyl)-ethoxycarbonylmethyl-amino]-propionic acid ethyl ester AC (4.7 g, 14.8 mmol) was taken up in dichloromethane. The suspension was cooled to 0° C. on ice. To the suspension diisopropylethylamine (3.87 g, 5.2 ml, 30 mmol) was added. To the resulting solution cholesteryl chloroformate (6.675 g, 14.8 mmol) was added. The reaction mixture was stirred overnight. The reaction mixture was diluted with dichloromethane and washed with 10% hydrochloric acid. The product was purified by flash chromatography (10.3 g, 92%).

### 1-{6-[17-(1,5-Dimethyl-hexyl)-10,13-dimethyl-2,3,4,7,8,9,10,11,12,13,14,15,16,17-tetradecahydro-1H-cyclopenta[a] phenanthren-3-yloxycarbonylamino]-hexanoyl}-4-oxo-pyrrolidine-3-carboxylic acid ethyl ester AE

[chemical structure]

[0417] Potassium t-butoxide (1.1 g, 9.8 mmol) was slurried in 30 ml of dry toluene. The mixture was cooled to 0° C. on ice and 5 g (6.6 mmol) of diester AD was added slowly with stirring within 20 mins. The temperature was kept below 5° C. during the addition. The stirring was continued for 30 mins at 0° C. and 1 ml of glacial acetic acid was added, immediately followed by 4 g of NaH₂PO₄.H₂O in 40 ml of water The resultant mixture was extracted twice with 100 ml of dichloromethane each and the combined organic extracts were washed twice with 10 ml of phosphate buffer each, dried, and evaporated to dryness. The residue was dissolved in 60 ml of toluene, cooled to 0° C. and extracted with three 50 ml portions of cold pH 9.5 carbonate buffer. The aqueous extracts were adjusted to pH 3 with phosphoric acid, and extracted with five 40 ml portions of chloroform which were combined, dried and evaporated to dryness. The residue was purified by column chromatography using 25% ethylacetate/hexane to afford 1.9 g of b-ketoester (39%).

### [6-(3-Hydroxy-4-hydroxymethyl-pyrrolidin-1-yl)-6-oxo-hexyl]-carbamic acid 17-(1,5-dimethyl-hexyl)-10,13-dimethyl-2,3,4,7,8,9,10,11,12,13,14,15,16,17-tetradecahydro-1H-cyclopenta[a]phenanthren-3-yl ester AF

[chemical structure]

[0419] Methanol (2 ml) was added dropwise over a period of 1 h to a refluxing mixture of b-ketoester AE (1.5 g, 2.2 mmol) and sodium borohydride (0.226 g, 6 mmol) in tetrahydrofuran (10 ml). Stirring was continued at reflux temperature for 1 h. After cooling to room temperature, 1 N HCl (12.5 ml) was added, the mixture was extracted with ethylacetate (3×40 ml). The combined ethylacetate layer was dried over anhydrous sodium sulfate and concentrated under vacuum to yield the product which was purified by column chromatography (10% MeOH/CHCl₃) (89%).

### (6-{3-[Bis-(4-methoxy-phenyl)-phenyl-methoxymethyl]-4-hydroxy-pyrrolidin-1-yl}-6-oxo-hexyl)-carbamic acid 17-(1,5-dimethyl-hexyl)-10,13-dimethyl-2,3,4,7,8,9,10,11,12,13,14,15,16,17-tetradecahydro-1H-cyclopenta[a]phenanthren-3-yl ester AG

[chemical structure]

[0421] Diol AF (1.25 gm 1.994 mmol) was dried by evaporating with pyridine (2×5 ml) in vacuo. Anhydrous pyridine (10 ml) and 4,4′-dimethoxytritylchloride (0.724 g, 2.13 mmol) were added with stirring. The reaction was carried out at room temperature overnight. The reaction was quenched by the addition of methanol. The reaction mixture was concentrated under vacuum and to the residue dichloromethane (50 ml) was added. The organic layer was washed with 1M aqueous sodium bicarbonate. The organic layer was dried over anhydrous sodium sulfate, filtered and concentrated. The residual pyridine was removed by evaporating with toluene. The crude product was purified by column chromatography (2% MeOH/Chloroform, Rf=0.5 in 5% MeOH/CHCl₃) (1.75 g, 95%).

### Succinic acid mono-(4-[bis-(4-methoxy-phenyl)-phenyl-methoxymethyl]-1-{6-[17-(1,5-dimethyl-hexyl)-10,13-dimethyl 2,3,4,7,8,9,10,11,12,13,14,15,16,17-tetradecahydro-1H cyclopenta[a]phenanthren-3-yloxycarbonylamino]-hexanoyl}-pyrrolidin-3-yl) ester AH

[chemical structure]

[0423] Compound AG (1.0 g, 1.05 mmol) was mixed with succinic anhydride (0.150 g, 1.5 mmol) and DMAP (0.073 g, 0.6 mmol) and dried in a vacuum at 40° C. overnight. The mixture was dissolved in anhydrous dichloroethane (3 ml), triethylamine (0.318 g, 0.440 ml, 3.15 mmol) was added and the solution was stirred at room temperature under argon atmosphere for 16 h. It was then diluted with dichloromethane (40 ml) and washed with ice cold aqueous citric acid (5 wt %, 30 ml) and water (2×20 ml). The organic phase was dried over anhydrous sodium sulfate and concentrated to dryness. The residue was used as such for the next step.

[0424] Cholesterol Derivatised CPG AI

[chemical structure]

[0425] Succinate AH (0.254 g, 0.242 mmol) was dissolved in a mixture of dichloromethane/acetonitrile (3:2, 3 ml). To that solution DMAP (0.0296 g, 0.242 mmol) in acetonitrile (1.25 ml), 2,2′-Dithio-bis(5-nitropyridine) (0.075 g, 0.242 mmol) in acetonitrile/dichloroethane (3:1, 1.25 ml) were added successively. To the resulting solution triphenylphosphine (0.064 g, 0.242 mmol) in acetonitrile (0.6 ml) was added. The reaction mixture turned bright orange in color. The solution was agitated briefly using a wrist-action shaker (5 mins). Long chain alkyl amine-CPG (LCAA-CPG) (1.5 g, 61 mM) was added. The suspension was agitated for 2 h. The CPG was filtered through a sintered funnel and washed with acetonitrile, dichloromethane and ether successively. Unreacted amino groups were masked using acetic anhydride/pyridine. The achieved loading of the CPG was measured by taking UV measurement (37 mM/g).

[0426] The synthesis of siRNAs bearing a 5′-12-dodecanoic acid bisdecylamide group (herein referred to as “5′-C32-”) or a 5′-cholesteryl derivative group (herein referred to as “5′-Chol-”) was performed as described in WO 2004/065601, except that, for the cholesteryl derivative, the oxidation step was performed using the Beaucage reagent in order to introduce a phosphorothioate linkage at the 5′-end of the nucleic acid oligomer.

[0427] Synthesis of dsRNAs conjugated to Chol-p-(GalNAc)₃ (N-acetyl galactosamine-cholesterol) (FIG. 16) and LCO(GalNAc)₃ (N-acetyl galactosamine-3′-Lithocholic-oleoyl) (FIG. 17) is described in U.S. patent application Ser. No. 12/328,528, filed on Dec. 4, 2008, which is hereby incorporated by reference.

### Example 3

### PCSK9 siRNA Screening in HuH7, HepG2, HeLa and Primary Monkey Hepatocytes Discovers Highly Active Sequences

[0428] HuH-7cells were obtained from JCRB Cell Bank (Japanese Collection of Research Bioresources) (Shinjuku, Japan, cat. No.: JCRB0403) Cells were cultured in Dulbecco's MEM (Biochrom AG, Berlin, Germany, cat. No. F0435) supplemented to contain 10% fetal calf serum (FCS) (Biochrom AG, Berlin, Germany, cat. No. S0115), Penicillin 100 U/ml, Streptomycin 100 μg/ml (Biochrom AG, Berlin, Germany, cat. No. A2213) and 2 mM L-Glutamin (Biochrom AG, Berlin, Germany, cat. No K0282) at 37° C. in an atmosphere with 5% CO₂ in a humidified incubator (Heraeus HERAcell, Kendro Laboratory Products, Langenselbold, Germany). HepG2 and HeLa cells were obtained from American Type Culture Collection (Rockville, Md., cat. No. HB-8065) and cultured in MEM (Gibco Invitrogen, Karlsruhe, Germany, cat. No. 21090-022) supplemented to contain 10% fetal calf serum (FCS) (Biochrom AG, Berlin, Germany, cat. No. S0115), Penicillin 100 U/ml, Streptomycin 100 μg/ml (Biochrom AG, Berlin, Germany, cat. No. A2213), lx Non Essential Amino Acids (Biochrom AG, Berlin, Germany, cat. No. K-0293), and 1 mM Sodium Pyruvate (Biochrom AG, Berlin, Germany, cat. No. L-0473) at 37° C. in an atmosphere with 5% CO₂ in a humidified incubator (Heraeus HERAcell, Kendro Laboratory Products, Langenselbold, Germany).

[0429] For transfection with siRNA, HuH7, HepG2, or HeLa cells were seeded at a density of 2.0×10⁴ cells/well in 96-well plates and transfected directly. Transfection of siRNA (30 nM for single dose screen) was carried out with lipofectamine 2000 (Invitrogen GmbH, Karlsruhe, Germany, cat. No. 11668-019) as described by the manufacturer.

[0430] 24 hours after transfection HuH7 and HepG2 cells were lysed and PCSK9 mRNA levels were quantified with the Quantigene Explore Kit (Genosprectra, Dumbarton Circle Fremont, USA, cat. No. QG-000-02) according to the protocol. PCSK9 mRNA levels were normalized to GAP-DH mRNA. For each siRNA eight individual datapoints were collected. siRNA duplexes unrelated to PCSK9 gene were used as control. The activity of a given PCSK9 specific siRNA duplex was expressed as percent PCSK9 mRNA concentration in treated cells relative to PCSK9 mRNA concentration in cells treated with the control siRNA duplex.

[0431] Primary cynomolgus monkey hepatocytes (cryopreserved) were obtained from In vitro Technologies, Inc. (Baltimore, Md., USA, cat No MO0305) and cultured in InVitroGRO CP Medium (cat No Z99029) at 37° C. in an atmosphere with 5% CO₂ in a humidified incubator.

[0432] For transfection with siRNA, primary cynomolgus monkey cells were seeded on Collagen coated plates (Fisher Scientific, cat. No. 08-774-5) at a density of 3.5×104 cells/well in 96-well plates and transfected directly. Transfection of siRNA (eight 2-fold dilution series starting from 30 nM) in duplicates was carried out with lipofectamine 2000 (Invitrogen GmbH, Karlsruhe, Germany, cat. No. 11668-019) as described by the manufacturer.

[0433] 16 hours after transfection medium was changed to fresh InVitroGRO CP Medium with Torpedo Antibiotic Mix (In vitro Technologies, Inc, cat. No Z99000) added.

[0434] 24 hours after medium change primary cynomolgus monkey cells were lysed and PCSK9 mRNA levels were quantified with the Quantigene Explore Kit (Genosprectra, Dumbarton Circle Fremont, USA, cat. No. QG-000-02) according to the protocol. PCSK9 mRNA levels were normalized to GAPDH mRNA. Normalized PCSK9/GAPDH ratios were then compared to PCSK9/GAPDH ratio of lipofectamine 2000 only control.

[0435] Tables 1b and 2b (and FIG. 6A) summarize the results and provide examples of in vitro screens in different cell lines at different doses. Silencing of PCSK9 transcript was expressed as percentage of remaining transcript at a given dose.

[0436] Highly active sequences are those with less than 70% transcript remaining post treatment with a given siRNA at a dose less than or equal to 100 nM. Very active sequences are those that have less than 60% of transcript remaining after treatment with a dose less than or equal to 100 nM. Active sequences are those that have less than 90% transcript remaining after treatment with a high dose (100 nM).

[0437] Examples of active siRNAs were also screened in vivo in mouse in lipidoid formulations as described below. Active sequences in vitro were also generally active in vivo (See FIGS. 6A and 6B and example 4).

### Example 4

### In Vivo Efficacy Screen of PCSK9 siRNAs in Mice

[0438] 32 PCSK9 siRNAs formulated in LNP-01 liposomes were tested in vivo in a mouse model. LNP01 is a lipidoid formulation formed from cholesterol, mPEG2000-C14 Glyceride, and dsRNA. The LNP01 formulation is useful for delivering dsRNAs to the liver.

[0439] Formulation Procedure

[0440] The lipidoid LNP-01.4HCl (MW 1487) (FIG. 1), Cholesterol (Sigma-Aldrich), and PEG-Ceramide C16 (Avanti Polar Lipids) were used to prepare lipid-siRNA nanoparticles. Stock solutions of each in ethanol were prepared: LNP-01, 133 mg/ml; Cholesterol, 25 mg/ml, PEG-Ceramide C16, 100 mg/ml. LNP-01, Cholesterol, and PEG-Ceramide C16 stock solutions were then combined in a 42:48:10 molar ratio. Combined lipid solution was mixed rapidly with aqueous siRNA (in sodium acetate pH 5) such that the final ethanol concentration was 35-45% and the final sodium acetate concentration was 100-300 mM. Lipid-siRNA nanoparticles formed spontaneously upon mixing. Depending on the desired particle size distribution, the resultant nanoparticle mixture was in some cases extruded through a polycarbonate membrane (100 nm cut-off) using a thermobarrel extruder (Lipex Extruder, Northern Lipids, Inc). In other cases, the extrusion step was omitted. Ethanol removal and simultaneous buffer exchange was accomplished by either dialysis or tangential flow filtration. Buffer was exchanged to phosphate buffered saline (PBS) pH 7.2.

[0441] Characterization of Formulations

[0442] Formulations prepared by either the standard or extrusion-free method are characterized in a similar manner. Formulations are first characterized by visual inspection. They should be whitish translucent solutions free from aggregates or sediment. Particle size and particle size distribution of lipid-nanoparticles are measured by dynamic light scattering using a Malvern Zetasizer Nano ZS (Malvern, USA). Particles should be 20-300 nm, and ideally, 40-100 nm in size. The particle size distribution should be unimodal. The total siRNA concentration in the formulation, as well as the entrapped fraction, is estimated using a dye exclusion assay. A sample of the formulated siRNA is incubated with the RNA-binding dye Ribogreen (Molecular Probes) in the presence or absence of a formulation disrupting surfactant, 0.5% Triton-X100. The total siRNA in the formulation is determined by the signal from the sample containing the surfactant, relative to a standard curve. The entrapped fraction is determined by subtracting the “free” siRNA content (as measured by the signal in the absence of surfactant) from the total siRNA content. Percent entrapped siRNA is typically >85%.

[0443] Bolus Dosing

[0444] Bolus dosing of formulated siRNAs in C57/BL6 mice (5/group, 8-10 weeks old, Charles River Laboratories, MA) was performed by tail vein injection using a 27 G needle. SiRNAs were formulated in LNP-01 (and then dialyzed against PBS) at 0.5 mg/ml concentration allowing the delivery of the 5 mg/kg dose in 10 μl/g body weight. Mice were kept under an infrared lamp for approximately 3 min prior to dosing to ease injection.

[0445] 48 hour post dosing mice were sacrificed by CO₂-asphyxiation. 0.2 ml blood was collected by retro-orbital bleeding and the liver was harvested and frozen in liquid nitrogen. Serum and livers were stored at −80° C. μl

[0446] Frozen livers were grinded using 6850 Freezer/Mill Cryogenic Grinder (SPEX CentriPrep, Inc) and powders stored at −80° C. until analysis.

[0447] PCSK9 mRNA levels were detected using the branched-DNA technology based kit from QuantiGene Reagent System (Genospectra) according to the protocol. 10-20 mg of frozen liver powders was lysed in 600 μl of 0.16 μg/ml Proteinase K (Epicentre, #MPRK092) in Tissue and Cell Lysis Solution (Epicentre, #MTC096H) at 65° C. for 3 hours. Then 10 μl of the lysates were added to 90 μl of Lysis Working Reagent (1 volume of stock Lysis Mixture in two volumes of water) and incubated at 52° C. overnight on Genospectra capture plates with probe sets specific to mouse PCSK9 and mouse GAPDH or cyclophilin B. Nucleic acid sequences for Capture Extender (CE), Label Extender (LE) and blocking (BL) probes were selected from the nucleic acid sequences of PCSK9, GAPDH and cyclophilin B with the help of the QuantiGene ProbeDesigner Software 2.0 (Genospectra, Fremont, Calif., USA, cat. No. QG-002-02). Chemo luminescence was read on a Victor2-Light (Perkin Elmer) as Relative light units. The ratio of PCSK9 mRNA to GAPDH or cyclophilin B mRNA in liver lysates was averaged over each treatment group and compared to a control group treated with PBS or a control group treated with an unrelated siRNA (blood coagulation factor VII).

[0448] Total serum cholesterol in mouse serum was measured using the StanBio Cholesterol LiquiColor kit (StanBio Laboratory, Boerne, Tex., USA) according to manufacturer's instructions. Measurements were taken on a Victor2 1420 Multilabel Counter (Perkin Elmer) at 495 nm.

[0449] Results

[0450] At least 10 PCSK9 siRNAs showed more than 40% PCSK9 mRNA knock down compared to a control group treated with PBS, while control group treated with an unrelated siRNA (blood coagulation factor VII) had no effect (FIGS. 2-3). Silencing of PCSK9 transcript also correlated with a lowering of total serum cholesterol in these animals (FIGS. 4-5). The most efficacious siRNAs with respect to knocking down PCSK9 mRNAs also showed the most pronounced cholesterol lowering effects (compare FIGS. 2-3 and FIGS. 4-5). In addition there was a strong correlation between those molecules that were active in vitro and those active in vivo (compare FIGS. 6A and 6B).

[0451] Sequences containing different chemical modifications were also screened in vitro (Tables 1 and 2) and in vivo. As an example, less modified sequences AD-9314 and AD-9318, and a more modified versions of that sequence AD-9314 (AD-10792, AD-10793, and AD-10796); AD-9318-(AD-10794, AD-10795, AD-10797) were tested both in vitro (in primary monkey hepatocytes) or in vivo (AD-9314 and AD-10792) formulated in LNP-01. FIG. 7 (also see Tables 1 and 2) shows that the parent molecules AD-9314 and AD-9318 and the modified versions were all active in vitro. FIG. 8 as an example shows that both the parent AD-9314 and the more highly modified AD-10792 sequences were active in vivo displaying 50-60% silencing of endogenous PCSK9 in mice. FIG. 9 further exemplifies that activity of other chemically modified versions of AD-9314 and AD-0792.

[0452] AD-3511, a derivative of AD-10792, was as efficacious as 10792 (IC50 of ˜0.07-0.2 nM) (data not shown). The sequences of the sense and antisense strands of AD-3511 are as follows:

Sense strand:
SEQ ID NO: 1521
5′-GccuGGAGuuuAuucGGAAdTsdT
Antisense strand:
SEQ ID NO: 1522
5′-puUCCGAAuAAACUCcAGGCdTsdT

### Example 5

### PCSK9 Duration of Action Experiments in Rats and NHP

[0453] Rats

[0454] Rats were treated via tail vein injection with 5 mg/kg of LNP01-10792 (Formulated ALDP-10792). Blood was drawn at the indicated time points (see Table 3) and the amount of total cholesterol compared to PBS treated animals was measured by standard means. Total cholesterol levels decreased at day two ˜60% and returned to baseline by day 28. These data show that formulated versions of PCSK9 siRNAs lower cholesterol levels for extended periods of time.

[0455] Monkeys

[0456] Cynomolgus monkeys were treated with LNP01 formulated dsRNA and LDL-C levels were evaluated. A total of 19 cynomolgus monkeys were assigned to dose groups. Beginning on Day −11, animals were limit-fed twice-a-day according to the following schedule: feeding at 9 a.m., feed removal at 10 a.m., feeding at 4 p.m., feed removal at 5 p.m. On the first day of dosing all animals were dosed once via 30-minute intravenous infusion. The animals were evaluated for changes in clinical signs, body weight, and clinical pathology indices, including direct LDL and HDL cholesterol.

[0457] Venipuncture through the femoral vein was used to collect blood samples. Samples were collected prior to the morning feeding (i.e., before 9 a.m.) and at approximately 4 hours (beginning at 1 p.m.) after the morning feeding on Days −3, −1, 3, 4, 5, and 7 for Groups 1-7; on Day 14 for Groups 1, 4, and 6; on Days 18 and 21 for Group 1; and on Day 21 for Groups 4 and 6. At least two 1.0 ml samples were collected at each time point.

[0458] No anticoagulant was added to the 1.0 ml serum samples, and the dry anticoagulant Ethylenediaminetetraacetic acid (K2) was added to each 1.0 ml plasma sample. Serum samples were allowed to stand at room temperature for at least 20 minutes to facilitate coagulation and then the samples were placed on ice. Plasma samples were placed on ice as soon as possible following sample collection. Samples were transported to the clinical pathology lab within 30 minutes for further processing.

[0459] Blood samples were processed to serum or plasma as soon as possible using a refrigerated centrifuge, per Testing Facility Standard operating procedure. Each sample was split into 3 approximately equal volumes, quickly frozen in liquid nitrogen, and placed at −70° C. Each aliquot should have had a minimum of approximately 50 μL. If the total sample volume collected was under 150 μL, the residual sample volume went into the last tube. Each sample was labeled with the animal number, dose group, day of collection, date, nominal collection time, and study number(s). Serum LDL cholesterol was measured directly per standard procedures on a Beckman analyzer according to manufactures instructions.

[0460] The results are shown in Table 4. LNP01-10792 and LNP01-9680 administered at 5 mg/kg decreased serum LDL cholesterol within 3 to 7 days following dose administration. Serum LDL cholesterol returned to baseline levels by Day 14 in most animals receiving LNP01-10792 and by Day 21 in animals receiving LNP01-9680. This data demonstrated a greater than 21 day duration of action for cholesterol lowering of LNP01 formulated ALDP-9680.

### Example 6

### PCSK9 siRNAs Cause Decreased PCSK mRNA in Liver Extracts, and Lower Serum Cholesterol Levels in Mice and Rats

[0461] To test if acute silencing of the PCSK9 transcript by a PCSK9 siRNA (and subsequent PCSK9 protein down-regulation), would result in acutely lower total cholesterol levels, siRNA molecule AD-1a2 (AD-10792) was formulated in an LNP01 lipidoid formulation. Sequences and modifications of these dsRNAs are shown in Table 5a. Liposomal formulated siRNA duplex AD-1a2 (LNP01-1a2) was injected via tail vein in low volumes (˜0.2 ml for mouse and ˜1.0 ml for rats) at different doses into C57/BL6 mice or Sprague Dawley rats.

[0462] In mice, livers were harvested 48 hours post-injection, and levels of PCSK9 transcript were determined. In addition to liver, blood was harvested and subjected to a total cholesterol analysis. LNP01-1a2 displayed a clear dose response with maximal PCSK9 message suppression (˜60-70%) as compared to a control siRNA targeting luciferase (LNP01-ctrl) or PBS treated animals (FIG. 14A). The decrease of PCSK9 transcript at the highest dose translated into a ˜30% lowering of total cholesterol in mice (FIG. 14B). This level of cholesterol reduction is between that reported for heterozygous and homozygous PCSK9 knock-out mice (Rashid et al., Proc. Natl. Acad. Sci. USA 102:5374-9, 2005, epub Apr. 1, 2005). Thus, lowering of PCSK9 transcript through an RNAi mechanism is capable of acutely decreasing total cholesterol in mice. Moreover the effect on the PCSK9 transcript persisted between 20-30 days, with higher doses displaying greater initial transcript level reduction, and subsequently more persistent effects.

[0463] Down-modulation of total cholesterol in rats has been historically difficult as cholesterol levels remain unchanged even at high doses of HMG-CoA reductase inhibitors. Interestingly, as compared to mice, rats appear to have a much higher level of PCSK9 basal transcript levels as measured by bDNA assays. Rats were dosed with a single injection of LNP01-a2 via tail vein at 1, 2.5 and 5 mg/kg. Liver tissue and blood were harvested 72 hours post-injection. LNP01-1a2 exhibited a clear dose response effect with maximal 50-60% silencing of the PCSK9 transcript at the highest dose, as compared to a control luciferase siRNA and PBS (FIG. 10A). The mRNA silencing was associate with an acute ˜50-60% decrease of serum total cholesterol (FIGS. 10A and 10B) lasting 10 days, with a gradual return to pre-dose levels by ˜3 weeks (FIG. 10B). This result demonstrated that lowering of PCSK9 via siRNA targeting had acute, potent and lasting effects on total cholesterol in the rat model system. To confirm that the transcript reduction observed was due to a siRNA mechanism, liver extracts from treated or control animals were subjected to 5′ RACE, a method previously utilized to demonstrate that the predicted siRNA cleavage event occurs (Zimmermann et al., Nature. 441:111-4, 2006, Epub 2006 Mar. 26). PCR amplification and detection of the predicted site specific mRNA cleavage event was observed in animals treated with LNP01-1a2, but not PBS or LNP01-ctrl control animals. (Frank-Kamanetsky et al. (2008) PNAS 105:119715-11920) This result demonstrated that the effects of LNP01-1a2 observed were due to cleavage of the PCSK9 transcript via an siRNA specific mechanism.

[0464] The mechanism by which PCSK9 impacts cholesterol levels has been linked to the number of LDLRs on the cell surface. Rats (as opposed to mice, NHP, and humans) control their cholesterol levels through tight regulation of cholesterol synthesis and to a lesser degree through the control of LDLR levels. To investigate whether modulation of LDLR was occurring upon RNAi therapeutic targeting of PCSK9, we quantified the liver LDLR levels (via western blotting) in rats treated with 5 mg/kg LNP01-1a2. As shown in FIG. 11, LNP01-1a2 treated animals had a significant (˜3-5 fold average) induction of LDLR levels 48 hours post a single dose of LNP01-1a2 compared to PBS or LNP01-ctrl control siRNA treated animals.

[0465] Assays were also performed to test whether reduction of PCSK9 changes the levels of triglycerides and cholesterol in the liver itself. Acute lowering of genes involved in VLDL assembly and secretion such as microsomal triglyceride transfer protein (MTP) or ApoB by genetic deletion, compounds, or siRNA inhibitors results in increased liver triglycerides (see, e.g., Akdim et al., Curr. Opin. Lipidol. 18:397-400, 2007). Increased clearance of plasma cholesterol induced by PCSK9 silencing in the liver (and a subsequent increase in liver LDLR levels) was not predicted to result in accumulation of liver triglycerides. However, to address this possibility, liver cholesterol and triglyceride concentrations in livers of the treated or control animals were quantified. As shown in FIG. 10C, there was no statistical difference in liver TG levels or cholesterol levels of rats administered PCSK9 siRNAs compared to the controls. These results indicated that PCSK9 silencing and subsequent cholesterol lowering is unlikely to result in excess hepatic lipid accumulation.

### Example 7

### Additional Modifications to siRNAs do not Affect Silencing and Duration of Cholesterol Reduction in Rats

[0466] Phosphorothioate modifications at the 3′ ends of both sense and antisense strands of a dsRNA can protect against exonucleases. 2′OMe and 2′F modifications in both the sense and antisense strands of a dsRNA can protect against endonucleases. AD-1a2 (see Table 5b) contains 2′OMe modifications on both the sense and antisense strands. Experiments were performed to determine if the inherent stability (as measured by siRNA stability in human serum) or the degree or type of chemical modification (2′OMe versus 2′F or a mixture) was related to either the observed rat efficacy or the duration of silencing effects. Stability of siRNAs with the same AD-1a2 core sequence, but containing different chemical modifications were created and tested for activity in vitro in primary Cyno monkey hepatocytes. A series of these molecules that maintained similar activity as measured by in vitro IC50 values for PCSK9 silencing (Table 5b), were then tested for their stability against exo and endonuclease cleavage in human serum. Each duplex was incubated in human serum at 37° C. (a time course), and subjected to HPLC analysis. The parent sequence AD-1a2 had a T½ of ˜7 hours in pooled human serum. Sequences AD-1a3, AD-1a5, and AD-1a4, which were more heavily modified (see chemical modifications in Table 5) all had T½'s greater than 24 hours. To test whether the differences in chemical modification or stability resulted in changes in efficacy, AD-1a2, AD-1a3, AD-1a5, AD-1a4, and an AD-control sequence were formulated and injected into rats. Blood was collected from animals at various days post-dose, and total cholesterol concentrations were measured. Previous experiments had shown a very tight correlation between the lowering of PCSK9 transcript levels and total cholesterol values in rats treated with LNP01-1a2 (FIG. 10A). All four molecules were observed to decrease total cholesterol by ˜60% day 2 post-dose (versus PBS or control siRNA), and all of the molecules had equal effects on total cholesterol levels displaying similar magnitude and duration profiles. There was no statistical difference in the magnitude of cholesterol lowering and the duration of effect demonstrated by these molecules, regardless of their different chemistries or stabilities in human serum.

### Example 8

### LNP01-1a2 and LNP01-3a1 Silence Human PCSK9 and Circulating Human PCSK9 Protein in Transgenic Mice

[0467] The efficacy of LNP01-1a2 (i.e., PCS-A2 or AD-10792) and another molecule, AD-3a1 (i.e., PCS-C2 or AD-9736) (which targets only human and monkey PCSK9 message), to silence the human PCSK9 gene was tested in vivo. A line of transgenic mice expressing human PCSK9 under the ApoE promoter was used (Lagace et al., J. Clin Invest. 116:2995-3005, 2006). Specific PCR reagents and antibodies were designed that detected the human but not the mouse transcripts and protein respectively. Cohorts of the humanized mice were injected with a single dose of LNP01-1a2 (a.k.a. LNP-PCS-A2) or LNP01-3a1 (a.k.a. LNP-PCS-C2), and 48 hours later both livers and blood were collected. A single dose of LNP01-1a2 or LNP01-3a1 was able to decrease the human PCSK9 transcript levels by >70% (FIG. 15A), and this transcript down-regulation resulted in significantly lower levels of circulating human PCSK9 protein as measured by ELISA (FIG. 15B). These results demonstrated that both siRNAs were capable of silencing the human transcript and subsequently reducing the amount of circulating plasma human PCSK9 protein.

### Example 9

### Secreted PCSK9 Levels are Regulated by Diet in NHP

[0468] In mice, PCSK9 mRNA levels are regulated by the transcription factor sterol regulatory element binding protein-2 and are reduced by fasting. In clinical practice, and standard NHP studies, blood collection and cholesterol levels are measured after an overnight fasting period. This is due in part to the potential for changes in circulating TGs to interfere with the calculation of LDLc values. Given the regulation of PCSK9 levels by fasting and feeding behavior in mice, experiments were performed to understand the effect of fasting and feeding in NHP.

[0469] Cyno monkeys were acclimated to a twice daily feeding schedule during which food was removed after a one hour period. Animals were fed from 9-10 am in the morning, after which food was removed. The animals were next fed once again for an hour between 5 pm-6 pm with subsequent food removal. Blood was drawn after an overnight fast (6 pm until 9 am the next morning), and again, 2 and 4 hours following the 9 am feeding. PCSK9 levels in blood plasma or serum were determined by ELISA assay (see Methods). Interestingly, circulating PCSK9 levels were found to be higher after the overnight fasting and decreased 2 and 4 hours after feeding. This data was consistent with rodent models where PCSK9 levels were highly regulated by food intake. However, unexpectedly, the levels of PCSK9 went down the first few hours post-feeding. This result enabled a more carefully designed NHP experiment to probe the efficacy of formulated AD-1a2 and another PCSK9 siRNA (AD-2a1) that was highly active in primary Cyno hepatocytes.

### Example 10

### PCSK9 siRNAs Reduce Circulating LDLc, ApoB, and PCSK9, but not HDLc in Non-Human Primates (NHPs)

[0470] siRNAs targeting PCSK9 acutely lowered both PCSK9 and total cholesterol levels by 72 hours post-dose and lasted ˜21-30 days after a single dose in mice and rats. To extend these findings to a species whose lipoprotein profiles most closely mimic that of humans, further experiments were performed in the Cynomologous (Cyno) monkey model.

[0471] siRNA 1 (LNP01-10792) and siRNA 2 (LNP-01-9680), both targeting PCSK9 were administered to cynomologous monkeys. As shown in FIG. 12, both siRNAs caused significant lipid lowering for up to 7 days post administration. siRNA 2 caused ˜50% lipid lowering for at least 7 days post-administration, and ˜60% lipid lowering at day 14 post-administration, and siRNA 1 caused ˜60% LDLc lowering for at least 7 days.

[0472] Male Cynos were first pre-screened for those that had LDLc of 40 mg/dl or higher. Chosen animals were then put on a fasted/fed diet regime and acclimated for 11 days. At day −3 and −1 pre-dose, serum was drawn at both fasted and 4 hours post-fed time points and analyzed for total cholesterol (Tc), LDL (LDLc), HDL cholesterol (HDLc) as well as triglycerides (TG), and PCSK9 plasma levels. Animals were randomized based on their day −3 LDLc levels. On the day of dosing (designated day 1), either 1 mg/kg or 5 mg/kg of LNP01-1a2 and 5 mg/kg LNP01-2a1 were injected, along with PBS and 1 mg/kg LNP01-ctrl as controls. All doses were well tolerated with no in-life findings. As the experiment progressed it became apparent (based on LDLc lowering) that the lower dose was not efficacious. We therefore dosed the PBS group animals on day 14 with 5 mg/kg LNP01-ctrl control siRNA, which could then serve as an additional control for the high dose groups of 5 mg/kg LNP01-1a2 and 5 mg/kg LNP01-2a1. Initially blood was drawn from animals on days 3, 4, 5, and 7 post-dose and Tc, HDLc, LDLc, and TGs concentrations were measured. Additional blood draws from the LNP01-1a2, LNP01-2a1 high dose groups were carried out at day 14 and day 21 post-dose (as the LDLc levels had not returned to baseline by day 7).

[0473] As shown in FIG. 12A, a single dose of LNP01-1a2 or LNP01-2a1 resulted in a statistically significant reduction of LDLc beginning at day 3 post-dose that returned to baseline over ˜14 days (for LNP01-1a2) and ˜21 days (LNP01-2a1). This effect was not seen in either the PBS, the control siRNA groups, or the 1 mg/kg treatment groups. LNP01-2a1 resulted in an average lowering of LDLc of 56% 72 hours post-dose, with 1 of 4 animals achieving nearly 70% LDLc, and all others achieving >50% LDLc decrease, as compared to pre-dose levels, (see FIG. 12A. As expected, the lowering of LDLc in the treated animals also correlated with a reduction of circulating ApoB levels as measured by serum ELISA (FIG. 12B). Interestingly, the degree of LDLc lowering observed in this study of Cyno monkey was greater than those that have been reported for high dose statins, as well as, for other current standard of care compounds used for hypercholesterolemia. The onset of action is also much more acute than that of statins with effects being seen as early as 48 hours post-dose.

[0474] Neither LNP01-1a2 nor LNP01-2a1 treatments resulted in a lowering of HDLc. In fact, both molecules resulted (on average) in a trend towards a decreased Tc/HDL ratio (FIG. 12C). In addition, circulating triglyceride levels, and with the exception of one animal, ALT and AST levels were not significantly impacted.

[0475] PCSK9 protein levels were also measured in treated and control animals. As shown in FIG. 11, LNP01-1a2 and LNP01-2a1 treatment each resulted in trends toward decreased circulating PCSK9 protein levels versus pre-dose. Specifically, the more active siRNA LNP01-2a1 demonstrated significant reduction of circulating PCSK9 protein versus both PBS (day 3-21) and LNP01-ctrl siRNA control (day 4, day 7).

### Example 11

### Modified siRNA and Activation of Immune Responses in hPBMCs

[0476] siRNAs were tested for activation of the immune system in primary human blood monocytes (hPBMC). Two control inducing sequences and the unmodified parental compound AD-1a1 was found to induce both IFN-alpha and TNF-alpha. However, chemically modified versions of this sequence (AD-1a2, AD-1a3, AD-1a5, and AD-1a4) as well as AD-2a1 were negative for both IFN-alpha and TNF-alpha induction in these same assays (see Table 5, and FIGS. 13A and 13B). Thus chemical modifications are capable of dampening both IFN-alpha and TNF-alpha responses to siRNA molecules. In addition, neither AD-1a2, nor AD-2a1 activated IFN-alpha when formulated into liposomes and tested in mice.

### Example 12

### Evaluation of siRNA Conjugates in Mice

[0477] AD-10792 was conjugated to GalNAc)3/Cholesterol (FIG. 16) or GalNAc)3/LCO (FIG. 17). The sense strand was synthesized with the conjugate on the 3′ end. The conjugated siRNAs were assayed for effects on PCSK9 transcript levels and total serum cholesterol in mice using the methods described below.

[0478] Briefly, mice were dosed via tail injection with one of the 2 conjugated siRNAs or PBS on three consecutive days: day 0, day 1 and day 2 with a dosage of about 100, 50, 25 or 12.5 mg/kg. Each dosage group included 6 mice. 24 hour post last dosing mice were sacrificed and blood and liver samples were obtained, stored, and processed to determine PCSK9 mRNA levels and total serum cholesterol.

[0479] The results are shown in FIG. 18. Compared to control PBS, both siRNA conjugates demonstrated activity with an ED50 of 3×50 mg/kg for GalNAc)3/Cholesterol conjugated AD-10792 and 3×100 mg/kg for GalNAc)3/LCO conjugated AD-10792. The results indicate that Cholesterol conjugated siRNA with GalNAc are active and capable of silencing PCSK9 in the liver resulting in cholesterol lowering.

[0480] Bolus Dosing

[0481] Bolus dosing of formulated siRNAs in C57/BL6 mice (6/group, 8-10 weeks old, Charles River Laboratories, MA) was performed by tail vein injection using a 27 G needle. SiRNAs were formulated in LNP-01 (and then dialyzed against PBS) and diluted with PBS to concentrations 1.0, 0.5, 0.25 and 0.125 mg/ml allowing the delivery of 100; 50; 25 and 12.5 mg/kg doses in 10 μl/g body weight. Mice were kept under an infrared lamp for approximately 3 min prior to dosing to ease injection.

[0482] 24 hour post last dose mice were sacrificed by CO2-asphyxiation. 0.2 ml blood was collected by retro-orbital bleeding and the liver was harvested and frozen in liquid nitrogen. Serum and livers were stored at −80° C. Frozen livers were grinded using 6850 Freezer/Mill Cryogenic Grinder (SPEX CentriPrep, Inc) and powders stored at −80° C. until analysis.

[0483] PCSK9 mRNA levels were detected using the branched-DNA technology based kit from QuantiGene Reagent System (Panomics, USA) according to the protocol. 10-20 mg of frozen liver powders was lysed in 600 μl of 0.16 μg/ml Proteinase K (Epicentre, #MPRK092) in Tissue and Cell Lysis Solution (Epicentre, #MTC096H) at 65° C. for 3 hours. Then 10 μl of the lysates were added to 90 μl of Lysis Working Reagent (1 volume of stock Lysis Mixture in two volumes of water) and incubated at 52° C. overnight on Genospectra capture plates with probe sets specific to mouse PCSK9 and mouse GAPDH. Probes sets for mouse PCSK9 and mouse GAPDH were purchased from Panomics, USA. Chemo luminescence was read on a Victor2-Light (Perkin Elmer) as Relative light units. The ratio of PCSK9 mRNA to mGAPDH mRNA in liver lysates was averaged over each treatment group and compared to a control group treated with PBS or a control group treated with an unrelated siRNA (blood coagulation factor VII).

[0484] Total serum cholesterol in mouse serum was measured using the Total Cholesterol Assay (Wako, USA) according to manufacturer's instructions. Measurements were taken on a Victor2 1420 Multilabel Counter (Perkin Elmer) at 600 nm.

### Example 13

### Evaluation of Lipid Formulated siRNAs in Rats

[0485] Briefly, rats were dosed via tail injection with SNALP formulated siRNAs or PBS with a single dosage of about 0.3, 1.0, and 3.0 mg/kg of SNALP formulated AD-10792. Each dosage group included 5 rats. 72 hour post dosing rats were sacrificed and blood and liver samples were obtained, stored, and processed to determine PCSK9 mRNA and total serum cholesterol levels. The results are shown in FIG. 19. Compared to control PBS, SNALP formulated AD-10792 (FIG. 19A) had an ED50 of about 1.0 mg/kg for both lowering of PCSK9 transcript levels and total serum cholesterol levels. These results show that administration of SNALP formulated siRNA results in effective and efficient silencing of PCSK9 and subsequent lowering of total cholesterol in vivo.

[0486] Bolus Dosing

[0487] Bolus dosing of formulated siRNAs in Sprague-Dawley rats (5/group, 170-190 g body weight, Charles River Laboratories, MA) was performed by tail vein injection using a 27 G needle. SiRNAs were formulated in SNALP (and then dialyzed against PBS) and diluted with PBS to concentrations 0.066; 0.2 and 0.6 mg/ml allowing the delivery of 0.3; 1.0 and 3.0 mg/kg of SNALP formulated AD-10792 in 5 μl/g body weight. Rats were kept under an infrared lamp for approximately 3 min prior to dosing to ease injection.

[0488] 72 hour post last dose rats were sacrificed by CO2-asphyxiation. 0.2 ml blood was collected by retro-orbital bleeding and the liver was harvested and frozen in liquid nitrogen. Serum and livers were stored at −80° C. Frozen livers were grinded using 6850 Freezer/Mill Cryogenic Grinder (SPEX CentriPrep, Inc) and powders stored at −80° C. until analysis.

[0489] PCSK9 mRNA levels were detected using the branched-DNA technology based kit from QuantiGene Reagent System (Panomics, USA) according to the protocol. 10-20 mg of frozen liver powders was lysed in 600 μl of 0.16 μg/ml Proteinase K (Epicentre, #MPRK092) in Tissue and Cell Lysis Solution (Epicentre, #MTC096H) at 65° C. for 3 hours. Then 10 μl of the lysates were added to 90 μl of Lysis Working Reagent (1 volume of stock Lysis Mixture in two volumes of water) and incubated at 52° C. overnight on Genospectra capture plates with probe sets specific to rat PCSK9 and rat GAPDH. Probes sets for rat PCSK9 and rat GAPDH were purchased from Panomics, USA. Chemo luminescence was read on a Victor2-Light (Perkin Elmer) as Relative light units. The ratio of rat PCSK9 mRNA to rat GAPDH mRNA in liver lysates was averaged over each treatment group and compared to a control group treated with PBS or a control group treated with an unrelated siRNA (blood coagulation factor VII).

[0490] Total serum cholesterol in rat serum was measured using the Total Cholesterol Assay (Wako, USA) according to manufacturer's instructions. Measurements were taken on a Victor2 1420 Multilabel Counter (Perkin Elmer) at 600 nm.

### Example 14

### In Vitro Efficacy Screen in HeLa Cells of Mismatch Walk of AD-9680 and AD-14676

[0491] The effects of variations in sequence or modification on the effectiveness of AD-9680, AD-14676, and AD-10792 were assayed in HeLa cells. A number of variants were synthesized as shown in Table 6 and include adding DFT (2,4-Difluorotoluyl, a thymidine triphosphate shape analog lacking Watson-Crick pairing); adding single or combination mismatches; and testing two different backbone chemistries: leading with a 2′-O methyl, or alternating with 2′F.

[0492] Sequences of the 3 parent duplexes can be found in Table 1a and are duplicated as follows:

| | | SEQ | | SEQ | |
|---|---|---|---|---|---|
| target | Sense strand | ID | Antisense strand | ID | |
| region | (5′ to 3′) | NO: | (5′ to 3′) | NO: | Duplex |
| 3530- | uucuAGAccuGuuuuGcuuTsT | 1229 | AAGcAAAAcAGGUCuAGAATsT | 1230 | AD- |
| 3548 | | | | | 9680 |
| 3530- | UfuCfuAfgAfcCfuGfuUfuUfg | 1231 | P- | 1232 | AD- |
| 3548 | CfuUfTsT | | aAfgCfaAfaAfcAfgGfuCfuAfgA | | 14676 |
| | | | faTsT | | |
| 1091- | GccuGGAGuuuAuucGGAATsT | 459 | UUCCGAAuAAACUCcAGGCTsT | 460 | AD- |
| 1109 | | | | | 10792 |

[0493] HeLa were plated in 96-well plates (8,000-10,000 cells/well) in 100 μl 10% fetal bovine serum in Dulbecco's Modified Eagle Medium (DMEM). When the cells reached approximately 50% confluence (˜24 hours later) they were transfected with serial four-fold dilutions of siRNA starting at 10 nM. 0.4 μl of transfection reagent Lipofectamine™ 2000 (Invitrogen Corporation, Carlsbad, Calif.) was used per well and transfections were performed according to the manufacturer's protocol. Namely, the siRNA: Lipofectamine™ 2000 complexes were prepared as follows. The appropriate amount of siRNA was diluted in Opti-MEM I Reduced Serum Medium without serum and mixed gently. The Lipofectamine™ 2000 was mixed gently before use, then for each well of a 96 well plate 0.4 μl was diluted in 25 μl of Opti-MEM I Reduced Serum Medium without serum and mixed gently and incubated for 5 minutes at room temperature. After the 5 minute incubation, 1 μl of the diluted siRNA was combined with the diluted Lipofectamine™ 2000 (total volume is 26.4 μl). The complex was mixed gently and incubated for 20 minutes at room temperature to allow the siRNA: Lipofectamine™ 2000 complexes to form. Then 100 μl of 10% fetal bovine serum in DMEM was added to each of the siRNA:Lipofectamine™ 2000 complexes and mixed gently by rocking the plate back and forth. 100 μl of the above mixture was added to each well containing the cells and the plates were incubated at 37° C. in a CO2 incubator for 24 hours, then the culture medium was removed and 100 μl 10% fetal bovine serum in DMEM was added.

[0494] 24 hours post medium change medium was removed, cells were lysed and cell lysates assayed for PCSK9 mRNA silencing by bDNA assay (Panomics, USA) following the manufacturer's protocol. Chemo luminescence was read on a Victor2-Light (Perkin Elmer) as Relative light units. The ratio of human PCSK9 mRNA to human GAPDH mRNA in cell lysates was compared to that of cells treated with Lipofectamine™ 2000 only control.

[0495] FIG. 20 is dose response curves of a series of compounds related to AD-9680. FIG. 21 is a dose response curve of a series of compounds related to AD-14676 The results show that DFTs or mismatches in certain positions are able increase the activity (as evidenced by lower IC50 values) of both parent compounds. FIG. 24 is a dose response curve comparing the efficiency of parent duplexes AD-9680 and AD-10792 with modified duplexes wherein a DFT is inserted at position 10 of the sense strand. This modification improves the efficiency by about 2 fold in HeLa cells.

[0496] Without being bound by theory, it is hypothesized that destabilization of the sense strand through the introduction of mismatches, or DFT might result in quicker removal of the sense strand.

### Example 15

### Lack of Off Target Effects in Hep3B Cells at High Concentrations

[0497] A lipid formulated PCSK9 targeted siRNA (AD-9680) was transfected into Hep3B cells at concentrations of 250 nM, 1 uM and 5 uM in triplicates using the reagent RNAiMAX (Invitrogen) according to the manufacture's instruction: lul of transfection reagent; reverse transfection protocol. Samples were collected 48 hrs post transfection. Total RNA was purified using MagMAX™-96 Total RNA Isolation Kit (Ambion); cDNA was synthesized with High Capacity cDNA Reverse Transcription Kit with RNase Inhibitor (ABI) from 13.5 μl of RNA prep; ABI Gene Expression Taqman assays were used; q-PCR reactions were set up according to manufacturer's instruction using TaqMan® Gene Expression Master Mix (ABI) and run on ABI 7900 machine. Delta delta Ct method was used to calculate values. Samples were normalized to hGAPDH and calibrated to mock transfection.

[0498] Transcript levels were measured for the following genes having the closest homology to the target sequence: ORMDL2, BMP6, TAPT1, MYEF2, LOC442252, RFT1, and PCSK9.

[0499] The results are shown in FIG. 22. No off target effects were observed at high concentrations of dsRNA (PCS-B2=AD-9680).

| | | | |
|---|---|---|---|
| AD-9680 | S | 1531 | uucuAGAccuGuuuuGcuudTsdT |
| | AS | 1532 | AAGcAAAAcAGGUCuAGAAdTsdT |

### Example 16

### Maintenance of Decrease in Total Cholesterol Levels in Rats by Lower Dosage of AD-10792

[0500] Rats were treated with 3 mg/kg bolus dose of SNALP-DlinDMA formulated AD-10792. At day 2, total serum cholesterol levels were determined. This was followed by once a week dosing at 1.0 and 0.3 mg/kg for four weeks. Rats were bled one day prior to repeat dosing and total serum cholesterol levels were determined. The negative control was PBS.

[0501] The results are shown in the graph of FIG. 23. After 3 mg/kg bolus dose, total cholesterol levels decreased by 60% and were maintained at about 50% by repeated once a week 1.0 and 0.3 mg/kg dosing and come back to pre dose levels after repeated dosing is stopped.

[0502] A 10 fold lower (than EC50), once a week, maintenance dose effectively maintains silencing with cholesterol levels returning to baseline by 15 days post last injection. The initial does of PCSK9 increased LDLR levels as reflected by the decrease in total serum cholesterol. This increase in LDLR levels increased the efficacy of the PCSK9 targeted siRNA as reflected by the lower dosage of subsequent administration AD-10792.

### Example 17

### Assay of Effects on Cholesterol Levels in Rats after Administration of Various Lipid Formulations of AD-10792

[0503] Rats were treated with four different lipid formulations of AD-10792 including SNALP and LNP08, described herein. At day 3, total serum cholesterol levels were determined. The experiment was performed using the methods described herein. Administration of LNP-08 formulated AD-10792 results in the lowest EC50 of 0.08 mg/kg compared to LNP01 formulated (EC50 of 2.0 mg/kg) and SNALP formulated (EC50 of 1.0 mg/kg). (data not shown).

### Example 18

### PCSK9 siRNA Filing Experiment

[0504] Bioinformatic Selection of PCSK9 Tiling Set

[0505] Sense and antisense oligomers were designed to target the human PCSK9 transcript in the flanking regions immediately upstream and downstream of the 19 base target region of ALN-PCSK9 (AD-9680). We used the NCBI Refseq NM_174936.2 as the reference human transcript for the PCSK9 gene. The antisense oligo of AD-9680 contains 19 contiguous bases complementary to the bases in the region of NM_174936 from positions 3530 through 3548 relative to the start of the mRNA. A set of siRNA molecules was designed to each unique 19mer of the subset of the transcript sequence defined by 10 bases upstream from the 5′ end to 10 bases downstream from the 3′ end of the target region of AD-9680. With respect to the NM_174936.2 transcript, the first base at the 5′ position of the sense oligo 19mer extends from positions 3520 to positions 3558 (Tables 7 and 8).

[0506] Synthesis of PCSK9 Tiling Sequences:

[0507] PCSK9 sequences were synthesized on MerMade 192 synthesizer. Two sets of sequences were made. The first set contained no chemical modifications (unmodified) and a second set was made with endolight chemical modifications. In sequences containing endolight chemical modification, all pyrimidines (cytosine and uridine) in the sense strand were replaced with corresponding 2′-O-Methyl bases (2′ 0-Methyl C and 2′-O-Methyl U). In the antisense strand, pyrimidines adjacent to (towards 5′ position) ribo A nucleoside were replaced with their corresponding 2-O-Methyl nucleosides. A two base dTsdT extension at the 3′ end of both sense and anti sense sequences was introduced. The sequence file was converted to a text file to make it compatible for loading in the MerMade 192 synthesis software.

[0508] The synthesis of PCSK9 sequences used solid supported oligonucleotide synthesis using phosphoramidite chemistry. The synthesis of the above sequences was performed at 1 μm scale in 96 well plates. The amidite solutions were prepared at 0.1 M concentration and ethyl thio tetrazole (0.6M in Acetonitrile) was used as activator. The synthesized sequences were cleaved and deprotected in 96 well plates, using methylamine in the first step and Fluoride ion in the second step. The crude sequences thus obtained were precipitated using acetone: ethanol mix and the pellet were re-suspended in 0.2M sodium acetate buffer. Samples from each sequence were analyzed by LC-MS and the resulting mass data confirmed the identity of the sequences. A selected set of samples were also analyzed by IEX chromatography. All sequences were purified on AKTA explorer purification system using Source 15Q column. A single peak corresponding to the full length sequence was collected in the eluent and was subsequently analyzed for purity by ion exchange chromatography. The purified sequences were desalted on a Sephadex G25 column using AKTA purifier. The desalted PCSK9 sequences were analyzed for concentration and purity. The single strands were then submitted for annealing.

[0509] In Vitro Screening of PCSK9 Tiling siRNAs:

[0510] Cell Culture and Transfection:

[0511] Hela cells (ATCC, Manassas, Va.) were grown to near confluence at 37° C. in an atmosphere of 5% CO₂ in Eagle's Minimum Essential Medium (EMEM, ATCC) supplemented with 10% FBS, streptomycin, and glutamine (ATCC) before being released from the plate by trypsinization. Reverse transfection was carried out by adding 5 μl of Opti-MEM to 5 μl of siRNA duplexes per well into a 96-well plate along with 10 μl of Opti-MEM plus 0.2 μl of Lipofectamine RNAiMax per well (Invitrogen, Carlsbad Calif. cat #13778-150) and incubated at room temperature for 15 minutes. 80 μl of complete growth media without antibiotic containing 2.0×10⁴ Hela cells were then added. Cells were incubated for 24 hours prior to RNA purification. Experiments were performed at 0.1 or 10 nM final duplex concentration. For dose response screens, HeLa cells were transfected with siRNAs over seven, ten-fold serial dilutions from 1 nM to 1 fM.

[0512] Total RNA was isolated using MagMAX-96 Total RNA Isolation Kit (Applied Biosystem, Forer City Calif., part #: AM1830). Cells were harvested and lysed in 140 μl of Lysis/Binding Solution then mixed for 1 minute at 850 rpm using and Eppendorf Thermomixer (the mixing speed was the same throughout the process). Twenty micro liters of magnetic beads and Lysis/Binding Enhancer mixture were added into cell-lysate and mixed for 5 minutes. Magnetic beads were captured using magnetic stand and the supernatant was removed without disturbing the beads. After removing supernatant, magnetic beads were washed with Wash Solution 1 (isopropanol added) and mixed for 1 minute. Beads were capture again and supernatant removed. Beads were then washed with 150 μl Wash Solution 2 (Ethanol added), captured and supernatant was removed. 50 μl of DNase mixture (MagMax turbo DNase Buffer and Turbo DNase) was then added to the beads and they were mixed for 10 to 15 minutes. After mixing, 100 μl of RNA Rebinding Solution was added and mixed for 3 minutes. Supernatant was removed and magnetic beads were washed again with 150 μl Wash Solution 2 and mixed for 1 minute and supernatant was removed completely. The magnetic beads were mixed for 2 minutes to dry before RNA was eluted with 50 μl of water.

[0513] cDNA was synthesized using ABI High capacity cDNA reverse transcription kit (Applied Biosystems, Foster City, Calif., Cat #4368813). A master mix of 2 μl 10× Buffer, 0.8 μl 25×dNTPs, 2 μl Random primers, 1 μl Reverse Transcriptase, 1 μl RNase inhibitor and 3.2 μl of H₂O per reaction were added into 10 μl total RNA. cDNA was generated using a Bio-Rad C-1000 or S-1000 thermal cycler (Hercules, Calif.) through the following steps: 25° C. 10 min, 37° C. 120 min, 85° C. 5 sec, 4° C. hold.

[0514] Real time PCR was performed as follows. 2 μl of cDNA were added to a master mix containing 1 μl GAPDH TaqMan Probe (Applied Biosystems Cat #4326317E), 1 μl PCSK9 TaqMan probe (Applied Biosystems cat # HS03037355_M1) and 10 μl Roche Probes Master Mix (Roche Cat #04887301001) per well in a LightCycler 480 384 well plate (Roche cat #0472974001). Real time PCR was done in a LightCycler 480 Real Time PCR machine (Roche). Each duplex was tested in two independent transfections and each transfections was assayed in duplicate.

[0515] Real time data were analyzed using the ΔΔ Ct method. Each sample was normalized to GAPDH expression and knockdown was assessed relative to cells transfected with the non-targeting duplex AD-1955. IC50s were defined using a 4 parameter fit model in XLfit.

[0516] The data for the single dose experiments are shown in Table 9. Data are expressed as the percent of message remaining relative to cells targeted with control AD-1955.

[0517] The data for the dose response screen is shown in Table 10. Data are expressed as dose in pM that results in 50% inhibition relative to AD-1955. Each dose response was repeated twice (Rep1 and Rep2). Average of the IC50s generated in the two dose response screens is shown.

[0518] The average IC50 for siRNA flanking AD-9680 was plotted vs. the starting position of the target region in the human PCSK9 transcript FIG. 25.

[0519] Thus, targeting nucleotide region 3520-3555 of PCSK9 with an RNAi agent is highly effective at inhibiting PCSK9.

### Example 19

### ApoE3-Based Reconstituted HDL Complexed with dsRNAs Targeting PCSK9

[0520] C57BL6 mice were administered 30 mg/kg rEHDL/chol-siPCSK9 by intravenous administration (tail vein injection) in a single bolus dose.

[0521] Chol-siPCSK9 (dsRNA Duplex AD-20583) has the following sequence:

Sense:
(SEQ ID NO: 1729)
GccuGGAGuuuAuucGGAAdTsdTL10
Antisense:
(SEQ ID NO:1730)
PuUfcCfgAfaUfaAfaCfuCfcAfgGfcdTsdT

[0522] The structure of L10 is:

[chemical structure]

[0523] After injection, mice were fasted overnight (˜14 hours), and then sacrificed at 48 h post-injection. mRNA levels from liver were determined by bDNA assay, and normalized to GAPDH mRNA levels.

[0524] Results

[0525] The results of the bDNA assays are shown in FIG. 26, which indicate that there was a significant reduction in PCSK9 following administration of rEHDL/chol-siPCSK9, but not following administration of uncomplexed siRNAs (chol-siPCSK9). rEHDL/chol-siPCSK9 decreased PCSK9 mRNA levels by about 80%.

### Example 20

### LNP-11 Formulated siRNA in Non-Human Primates (NHPs)

[0526] An siRNA targeting PCSK9 (AD-9680) was formulated in a LNP-11 formulation (described herein) and administered to cynomologous monkeys. Control was AD-1955. The lipid formulated siRNAs were administered via a 30 minute infusion on day 1 at dosages of 0.03, 0.1, 0.3, and 1.0 mg/kg. Control was administered at 1.0 mg/kg. On day 3, liver biopsies were performed for measurement of PCSK9 transcript. Blood samples were collected on days −3, −1, 3, 4, 5, 7, 9, 11, 12, 15, 22, 30, and 37 and PCSK9 protein levels and LDLc numbers and HDLc numbers were determined.

[0527] The results are shown in FIG. 27A, FIG. 27B, and FIG. 27C.

[0528] As shown in FIG. 27A and FIG. 27B, administration resulted in a rapid and durable dose dependent reduction in PCSK9 protein levels and resulted in >50% reduction in LDLc (LDL cholesterol) levels. These effects were very potent with ED50 dose levels between 30 and 100 micrograms per kilogram. As shown in FIG. 27C, administration resulted in no change in HDLc levels.

### Example 21

### Dose Response in Rats with LNP-09 Formulated PCSK9 dsRNA

[0529] The dsRNA AD-10792 (targeting rate PCSK9) was encapsulated in a XTC containing formulation, e.g., a LNP09 formulation. LNP09 formulation was XTC/DSPC/Cholesterol/PEG-DMG at a % mol ratio of 50/10/38.5/1.5 and a lipid:siRNA ratio of 10:1.

[0530] Formulations were injected via tail vein, single dose (DRC) into rats. Livers and plasma were harvested 72 hours post-injection (5 animals per group). PCSK9 transcript levels were measured via bDNA in livers prepared as manufacturer's protocol. GAPDH transcript levels were also measured and the PCSK9 to GAPDH ratios were normalized to those of PBS control and graphed. Total cholesterol was measured in serum using cholesterol kit from WAKO TX.

[0531] The results are shown in FIG. 29. With this formulation PCSK9 silencing and total cholesterol lowering in rats was achieved at doses <0.1 mg/kg. The ED₅₀ for was 0.2 mg/kg for lowering PCSK9 mRNA and 0.2 mg/kg and 0.08 for lowering serum cholesterol.

### Example 22

### Treatment of Transgenic Mice with LNP-09 Formulated PCSK9 dsRNA

[0532] Transgenic mice that overexpress human CETP and ApoB100 (CETP/ApoB double humanized transgenic mice, Taconic Labs) more closely mimic the LDL/HDL ratios found in man.

[0533] CETP/ApoB double humanized transgenic mice were purchased from Taconic labs. Animals were injected through tail vein (single injection) of 5 mg/kg of LNP09 formulated AD-10792 (standard formulation procedure), or AD-1955 Luciferase control (4 animals per group). Livers and plasma were harvested 72 hours post-injection (5 animals per group) and liver PCSK9 mRNA, LDL particle, and HDL particle number were determined.

[0534] PCSK9 transcript levels were measured via bDNA in livers prepared according to manufacturer's protocol. GAPDH transcript levels were also measured and the PCSK9 to GAPDH ratios were graphed, normalized to those of PBS control. LDL and HDL particle numbers/concentration were measured by NMR (Liposciences Inc.) based on their SOP.

[0535] The results are shown in FIG. 30. Silencing of PCSK9 lowered LDL particle concentrations ˜90%, while HDL levels were modestly lower (as compared to those treated animals treated with PBS controls). This demonstrates significant lowering of PCSK9 levels with subsequent LDLc lowering in these animals.

### Example 23

### Inhibition of PCSK9 Expression in Humans

[0536] A human subject is treated with a lipid formulated dsRNA targeted to a PCSK9 gene, described herein, to inhibit expression of the PCSK9 gene and lower cholesterol levels for an extended period of time following a single dose. In one embodiment, the lipid formulated dsRNA includes the lipid MC3.

[0537] A subject in need of treatment is selected or identified. The subject can be in need of LDL lowering, LDL lowering without lowering of HDL, ApoB lowering, or total cholesterol lowering. The identification of the subject can occur in a clinical setting, or elsewhere, e.g., in the subject's home through the subject's own use of a self-testing kit.

[0538] At time zero, a suitable first dose of an anti-PCSK9 siRNA is subcutaneously administered to the subject. The dsRNA is formulated as described herein. After a period of time following the first dose, e.g., 7 days, 14 days, and 21 days, the subject's condition is evaluated, e.g., by measuring LDL, ApoB, and/or total cholesterol levels. This measurement can be accompanied by a measurement of PCSK9 expression in said subject, and/or the products of the successful siRNA-targeting of PCSK9 mRNA. Other relevant criteria can also be measured. The number and strength of doses are adjusted according to the subject's needs.

[0539] After treatment, the subject's LDL, ApoB, or total cholesterol levels are lowered relative to the levels existing prior to the treatment, or relative to the levels measured in a similarly afflicted but untreated subject.

[0540] Those skilled in the art are familiar with methods and compositions in addition to those specifically set out in the present disclosure which will allow them to practice this invention to the full scope of the claims hereinafter appended.

TABLE 1a
dsRNA sequences targeted to PCSK9

| position | | | | | |
|---|---|---|---|---|---|
| in human | | | | | |
| access. | | SEQ | | SEQ | |
| # | | ID | Antisense- | ID | Duplex |
| NM_174936 | Sense strand sequence (5′-3′)¹ | NO: | strand sequence (5′-3′)¹ | NO: | name |
| 2-20 | AGCGACGUCGAGGCGCUCATT | 1 | UGAGCGCCUCGACGUCGCUTT | 2 | AD- |
| | | | | | 15220 |
| 15-33 | CGCUCAUGGUUGCAGGCGGTT | 3 | CCGCCUGCAACCAUGAGCGTT | 4 | AD- |
| | | | | | 15275 |
| 16-34 | GCUCAUGGUUGCAGGCGGGTT | 5 | CCCGCCUGCAACCAUGAGCTT | 6 | AD- |
| | | | | | 15301 |
| 30-48 | GCGGGCGCCGCCGUUCAGUTT | 7 | ACUGAACGGCGGCGCCCGCTT | a | AD- |
| | | | | | 15276 |
| 31-49 | CGGGCGCCGCCGUUCAGUUTT | 9 | AACUGAACGGCGGCGCCCGTT | 10 | AD- |
| | | | | | 15302 |
| 32-50 | GGGCGCCGCCGUUCAGUUCTT | 11 | GAACUGAACGGCGGCGCCCTT | 12 | AD- |
| | | | | | 15303 |
| 40-58 | CCGUUCAGUUCAGGGUCUGTT | 13 | CAGACCCUGAACUGAACGGTT | 14 | AD- |
| | | | | | 15221 |
| 43-61 | UUCAGUUCAGGGUCUGAGCTT | 15 | GCUCAGACCCUGAACUGAATT | 16 | AD- |
| | | | | | 15413 |
| 82-100 | GUGAGACUGGCUCGGGCGGTT | 17 | CCGCCCGAGCCAGUCUCACTT | 18 | AD- |
| | | | | | 15304 |
| 100-118 | GGCCGGGACGCGUCGUUGCTT | 19 | GCAACGACGCGUCCCGGCCTT | 20 | AD- |
| | | | | | 15305 |
| 101-119 | GCCGGGACGCGUCGUUGCATT | 21 | UGCAACGACGCGUCCCGGCTT | 22 | AD- |
| | | | | | 15306 |
| 102-120 | CCGGGACGCGUCGUUGCAGTT | 23 | CUGCAACGACGCGUCCCGGTT | 24 | AD- |
| | | | | | 15307 |
| 105-123 | GGACGCGUCGUUGCAGCAGTT | 25 | CUGCUGCAACGACGCGUCCTT | 26 | AD- |
| | | | | | 15277 |
| 135-153 | UCCCAGCCAGGAUUCCGCGTsT | 27 | CGCGGAAUCCUGGCUGGGATsT | 28 | AD- |
| | | | | | 9526 |
| 135-153 | ucccAGccAGGAuuccGcGTsT | 29 | CGCGGAAUCCUGGCUGGGATsT | 30 | AD- |
| | | | | | 9652 |
| 136-154 | CCCAGCCAGGAUUCCGCGCTsT | 31 | GCGCGGAAUCCUGGCUGGGTsT | 32 | AD- |
| | | | | | 9519 |
| 136-154 | cccAGccAGGAuuccGcGcTsT | 33 | GCGCGGAAUCCUGGCUGGGTsT | 34 | AD- |
| | | | | | 9645 |
| 138-156 | CAGCCAGGAUUCCGCGCGCTsT | 35 | GCGCGCGGAAUCCUGGCUGTsT | 36 | AD- |
| | | | | | 9523 |
| 138-156 | cAGccAGGAuuccGcGcGcTsT | 37 | GCGCGCGGAAUCCUGGCUGTsT | 38 | AD- |
| | | | | | 9649 |
| 185-203 | AGCUCCUGCACAGUCCUCCTsT | 39 | GGAGGACUGUGCAGGAGCUTsT | 40 | AD- |
| | | | | | 9569 |
| 185-203 | AGcuccuGcAcAGuccuccTsT | 41 | GGAGGACUGUGcAGGAGCUTsT | 42 | AD- |
| | | | | | 9695 |
| 205-223 | CACCGCAAGGCUCAAGGCGTT | 43 | CGCCUUGAGCCUUGCGGUGTT | 44 | AD- |
| | | | | | 15222 |
| 208-226 | CGCAAGGCUCAAGGCGCCGTT | 45 | CGGCGCCUUGAGCCUUGCGTT | 46 | AD- |
| | | | | | 15278 |
| 210-228 | CAAGGCUCAAGGCGCCGCCTT | 47 | GGCGGCGCCUUGAGCCUUGTT | 48 | AD- |
| | | | | | 15178 |
| 232-250 | GUGGACCGCGCACGGCCUCTT | 49 | GAGGCCGUGCGCGGUCCACTT | 50 | AD- |
| | | | | | 15308 |
| 233-251 | UGGACCGCGCACGGCCUCUTT | 51 | AGAGGCCGUGCGCGGUCCATT | 52 | AD- |
| | | | | | 15223 |
| 234-252 | GGACCGCGCACGGCCUCUATT | 53 | UAGAGGCCGUGCGCGGUCCTT | 54 | AD- |
| | | | | | 15309 |
| 235-253 | GACCGCGCACGGCCUCUAGTT | 55 | CUAGAGGCCGUGCGCGGUCTT | 56 | AD- |
| | | | | | 15279 |
| 236-254 | ACCGCGCACGGCCUCUAGGTT | 57 | CCUAGAGGCCGUGCGCGGUTT | 58 | AD- |
| | | | | | 15194 |
| 237-255 | CCGCGCACGGCCUCUAGGUTT | 59 | ACCUAGAGGCCGUGCGCGGTT | 60 | AD- |
| | | | | | 15310 |
| 238-256 | CGCGCACGGCCUCUAGGUCTT | 61 | GACCUAGAGGCCGUGCGCGTT | 62 | AD- |
| | | | | | 15311 |
| 239-257 | GCGCACGGCCUCUAGGUCUTT | 63 | AGACCUAGAGGCCGUGCGCTT | 64 | AD- |
| | | | | | 15392 |
| 240-258 | CGCACGGCCUCUAGGUCUCTT | 65 | GAGACCUAGAGGCCGUGCGTT | 66 | AD- |
| | | | | | 15312 |
| 248-266 | CUCUAGGUCUCCUCGCCAGTT | 67 | CUGGCGAGGAGACCUAGAGTT | 68 | AD- |
| | | | | | 15313 |
| 249-267 | UCUAGGUCUCCUCGCCAGGTT | 69 | CCUGGCGAGGAGACCUAGATT | 70 | AD- |
| | | | | | 15280 |
| 250-268 | CUAGGUCUCCUCGCCAGGATT | 71 | UCCUGGCGAGGAGACCUAGTT | 72 | AD- |
| | | | | | 15267 |
| 252-270 | AGGUCUCCUCGCCAGGACATT | 73 | UGUCCUGGCGAGGAGACCUTT | 74 | AD- |
| | | | | | 15314 |
| 258-276 | CCUCGCCAGGACAGCAACCTT | 75 | GGUUGCUGUCCUGGCGAGGTT | 76 | AD- |
| | | | | | 15315 |
| 300-318 | CGUCAGCUCCAGGCGGUCCTsT | 77 | GGACCGCCUGGAGCUGACGTsT | 78 | AD- |
| | | | | | 9624 |
| 300-318 | cGucAGcuccAGGcGGuccTsT | 79 | GGACCGCCUGGAGCUGACGTsT | 80 | AD- |
| | | | | | 9750 |
| 301-319 | GUCAGCUCCAGGCGGUCCUTsT | 81 | AGGACCGCCUGGAGCUGACTsT | 82 | AD- |
| | | | | | 9623 |
| 301-319 | GucAGcuccAGGcGGuccuTsT | 83 | AGGACCGCCUGGAGCUGACTsT | 84 | AD- |
| | | | | | 9749 |
| 370-388 | GGCGCCCGUGCGCAGGAGGTT | 85 | CCUCCUGCGCACGGGCGCCTT | 86 | AD- |
| | | | | | 15384 |
| 408-426 | GGAGCUGGUGCUAGCCUUGTsT | 87 | CAAGGCUAGCACCAGCUCCTsT | 88 | AD- |
| | | | | | 9607 |
| 408-426 | GGAGcuGGuGcuAGccuuGTsT | 89 | cAAGGCuAGcACcAGCUCCTsT | 90 | AD- |
| | | | | | 9733 |
| 411-429 | GCUGGUGCUAGCCUUGCGUTsT | 91 | ACGCAAGGCUAGCACCAGCTsT | 92 | AD- |
| | | | | | 9524 |
| 411-429 | GcuGGuGcuAGccuuGcGuTsT | 93 | ACGcAAGGCuAGcACcAGCTsT | 94 | AD- |
| | | | | | 9650 |
| 412-430 | CUGGUGCUAGCCUUGCGUUTsT | 95 | AACGCAAGGCUAGCACCAGTsT | 96 | AD- |
| | | | | | 9520 |
| 412-430 | CUGGUGCUAGCCUUGCGUUTsT | 97 | AACGCAAGGCUAGCACCAGTsT | 98 | AD- |
| | | | | | 9520 |
| 412-430 | cuGGuGcuAGccuuGcGuuTsT | 99 | AACGcAAGGCuAGcACcAGTsT | 100 | AD- |
| | | | | | 9646 |
| 416-434 | UGCUAGCCUUGCGUUCCGATsT | 101 | UCGGAACGCAAGGCUAGCATsT | 102 | AD- |
| | | | | | 9608 |
| 416-434 | uGcuAGccuuGcGuuccGATsT | 103 | UCGGAACGcAAGGCuAGcATsT | 104 | AD- |
| | | | | | 9734 |
| 419-437 | UAGCCUUGCGUUCCGAGGATsT | 105 | UCCUCGGAACGCAAGGCUATsT | 106 | AD- |
| | | | | | 9546 |
| 419-437 | uAGc cuuGcGuuccGAGGATsT | 107 | UCCUCGGAACGcAAGGCuATsT | 108 | AD- |
| | | | | | 9672 |
| 439-457 | GACGGCCUGGCCGAAGCACTT | 109 | GUGCUUCGGCCAGGCCGUCTT | 110 | AD- |
| | | | | | 15385 |
| 447-465 | GGCCGAAGCACCCGAGCACTT | 111 | GUGCUCGGGUGCUUCGGCCTT | 112 | AD- |
| | | | | | 15393 |
| 448-466 | GCCGAAGCACCCGAGCACGTT | 113 | CGUGCUCGGGUGCUUCGGCTT | 114 | AD- |
| | | | | | 15316 |
| 449-467 | CCGAAGCACCCGAGCACGGTT | 115 | CCGUGCUCGGGUGCUUCGGTT | 116 | AD- |
| | | | | | 15317 |
| 458-476 | CCGAGCACGGAACCACAGCTT | 117 | GCUGUGGUUCCGUGCUCGGTT | 118 | AD- |
| | | | | | 15318 |
| 484-502 | CACCGCUGCGCCAAGGAUCTT | 119 | GAUCCUUGGCGCAGCGGUGTT | 120 | AD- |
| | | | | | 15195 |
| 486-504 | CCGCUGCGCCAAGGAUCCGTT | 121 | CGGAUCCUUGGCGCAGCGGTT | 122 | AD- |
| | | | | | 15224 |
| 487-505 | CGCUGCGCCAAGGAUCCGUTT | 123 | ACGGAUCCUUGGCGCAGCGTT | 124 | AD- |
| | | | | | 15188 |
| 489-507 | CUGCGCCAAGGAUCCGUGGTT | 125 | CCACGGAUCCUUGGCGCAGTT | 126 | AD- |
| | | | | | 15225 |
| 500-518 | AUCCGUGGAGGUUGCCUGGTT | 127 | CCAGGCAACCUCCACGGAUTT | 128 | AD- |
| | | | | | 15281 |
| 509-527 | GGUUGCCUGGCACCUACGUTT | 129 | ACGUAGGUGCCAGGCAACCTT | 130 | AD- |
| | | | | | 15282 |
| 542-560 | AGGAGACCCACCUCUCGCATT | 131 | UGCGAGAGGUGGGUCUCCUTT | 132 | AD- |
| | | | | | 15319 |
| 543-561 | GGAGACCCACCUCUCGCAGTT | 133 | CUGCGAGAGGUGGGUCUCCTT | 134 | AD- |
| | | | | | 15226 |
| 544-562 | GAGACCCACCUCUCGCAGUTT | 135 | ACUGCGAGAGGUGGGUCUCTT | 136 | AD- |
| | | | | | 15271 |
| 549-567 | CCACCUCUCGCAGUCAGAGTT | 137 | CUCUGACUGCGAGAGGUGGTT | 138 | AD- |
| | | | | | 15283 |
| 552-570 | CCUCUCGCAGUCAGAGCGCTT | 139 | GCGCUCUGACUGCGAGAGGTT | 140 | AD- |
| | | | | | 15284 |
| 553-571 | CUCUCGCAGUCAGAGCGCATT | 141 | UGCGCUCUGACUGCGAGAGTT | 142 | AD- |
| | | | | | 15189 |
| 554-572 | UCUCGCAGUCAGAGCGCACTT | 143 | GUGCGCUCUGACUGCGAGATT | 144 | AD- |
| | | | | | 15227 |
| 555-573 | CUCGCAGUCAGAGCGCACUTsT | 145 | AGUGCGCUCUGACUGCGAGTsT | 146 | AD- |
| | | | | | 9547 |
| 555-573 | cucGcAGucAGAGcGcAcuTsT | 147 | AGUGCGCUCUGACUGCGAGTsT | 148 | AD- |
| | | | | | 9673 |
| 558-576 | GCAGUCAGAGCGCACUGCCTsT | 149 | GGCAGUGCGCUCUGACUGCTsT | 150 | AD- |
| | | | | | 9548 |
| 558-576 | GcAGucAGAGcGcAcuGccTsT | 151 | GGcAGUGCGCUCUGACUGCTsT | 152 | AD- |
| | | | | | 9674 |
| 606-624 | GGGAUACCUCACCAAGAUCTsT | 153 | GAUCUUGGUGAGGUAUCCCTsT | 154 | AD- |
| | | | | | 9529 |
| 606-624 | GGGAuAccucAccAAGAucTsT | 155 | GAUCUUGGUGAGGuAUCCCTsT | 156 | AD- |
| | | | | | 9655 |
| 659-677 | UGGUGAAGAUGAGUGGCGATsT | 157 | UCGCCACUCAUCUUCACCATsT | 158 | AD- |
| | | | | | 9605 |
| 659-677 | uGGuGAAGAuGAGuGGcGATsT | 159 | UCGCcACUcAUCUUcACcATsT | 160 | AD- |
| | | | | | 9731 |
| 663-681 | GAAGAUGAGUGGCGACCUGTsT | 161 | CAGGUCGCCACUCAUCUUCTsT | 162 | AD- |
| | | | | | 9596 |
| 663-681 | GAAGAuGAGuGGcGAccuGTsT | 163 | cAGGUCGCcACUcAUCUUCTsT | 164 | AD- |
| | | | | | 9722 |
| 704-722 | CCCAUGUCGACUACAUCGATsT | 165 | UCGAUGUAGUCGACAUGGGTsT | 166 | AD- |
| | | | | | 9583 |
| 704-722 | cccAuGucGAcuAcAucGATsT | 167 | UCGAUGuAGUCGAcAUGGGTsT | 168 | AD- |
| | | | | | 9709 |
| 718-736 | AUCGAGGAGGACUCCUCUGTsT | 169 | CAGAGGAGUCCUCCUCGAUTsT | 170 | AD- |
| | | | | | 9579 |
| 718-736 | AucGAGGAGGAcuccucuGTsT | 171 | cAGAGGAGUCCUCCUCGAUTsT | 172 | AD- |
| | | | | | 9705 |
| 758-776 | GGAACCUGGAGCGGAUUACTT | 173 | GUAAUCCGCUCCAGGUUCCTT | 174 | AD- |
| | | | | | 15394 |
| 759-777 | GAACCUGGAGCGGAUUACCTT | 175 | GGUAAUCCGCUCCAGGUUCTT | 176 | AD- |
| | | | | | 15196 |
| 760-778 | AACCUGGAGCGGAUUACCCTT | 177 | GGGUAAUCCGCUCCAGGUUTT | 178 | AD- |
| | | | | | 15197 |
| 777-795 | CCCUCCACGGUACCGGGCGTT | 179 | CGCCCGGUACCGUGGAGGGTT | 180 | AD- |
| | | | | | 15198 |
| 782-800 | CACGGUACCGGGCGGAUGATsT | 181 | UCAUCCGCCCGGUACCGUGTsT | 182 | AD- |
| | | | | | 9609 |
| 782-800 | cAcGGuAccGGGcGGAuGATsT | 183 | UcAUCCGCCCGGuACCGUGTsT | 184 | AD- |
| | | | | | 9735 |
| 783-801 | ACGGUACCGGGCGGAUGAATsT | 185 | UUCAUCCGCCCGGUACCGUTsT | 186 | AD- |
| | | | | | 9537 |
| 783-801 | AcGGuAccGGGcGGAuGAATsT | 187 | UUcAUCCGCCCGGuACCGUTsT | 188 | AD- |
| | | | | | 9663 |
| 784-802 | CGGUACCGGGCGGAUGAAUTsT | 189 | AUUCAUCCGCCCGGUACCGTsT | 190 | AD- |
| | | | | | 9528 |
| 784-802 | cGGuAccGGGcGGAuGAAuTsT | 191 | AUUcAUCCGCCCGGuACCGTsT | 192 | AD- |
| | | | | | 9654 |
| 785-803 | GGUACCGGGCGGAUGAAUATsT | 193 | UAUUCAUCCGCCCGGUACCTsT | 194 | AD- |
| | | | | | 9515 |
| 785-803 | GGuAccGGGcGGAuGAAuATsT | 195 | uAUUcAUCCGCCCGGuACCTsT | 196 | AD- |
| | | | | | 9641 |
| 786-804 | GUACCGGGCGGAUGAAUACTsT | 197 | GUAUUCAUCCGCCCGGUACTsT | 198 | AD- |
| | | | | | 9514 |
| 786-804 | GuAccGGGcGGAuGAAuAcTsT | 199 | GuAUUcAUCCGCCCGGuACTsT | 200 | AD- |
| | | | | | 9640 |
| 788-806 | ACCGGGCGGAUGAAUACCATsT | 201 | UGGUAUUCAUCCGCCCGGUTsT | 202 | AD- |
| | | | | | 9530 |
| 788-806 | AccGGGcGGAuGAAuAccATsT | 203 | UGGuAUUcAUCCGCCCGGUTsT | 204 | AD- |
| | | | | | 9656 |
| 789-807 | CCGGGCGGAUGAAUACCAGTsT | 205 | CUGGUAUUCAUCCGCCCGGTsT | 206 | AD- |
| | | | | | 9538 |
| 789-807 | ccGGGcGGAuGAAuAccAGTsT | 207 | CUGGuAUUcAUCCGCCCGGTsT | 208 | AD- |
| | | | | | 9664 |
| 825-843 | CCUGGUGGAGGUGUAUCUCTsT | 209 | GAGAUACACCUCCACCAGGTsT | 210 | AD- |
| | | | | | 9598 |
| 825-843 | ccuGGuGGAGGuGuAucucTsT | 211 | GAGAuAcACCUCcACcAGGTsT | 212 | AD- |
| | | | | | 9724 |
| 826-844 | CUGGUGGAGGUGUAUCUCCTsT | 213 | GGAGAUACACCUCCACCAGTsT | 214 | AD- |
| | | | | | 9625 |
| 826-844 | cuGGuGGAGGuGuAucuccTsT | 215 | GGAGAuAcACCUCcACcAGTsT | 216 | AD- |
| | | | | | 9751 |
| 827-845 | UGGUGGAGGUGUAUCUCCUTsT | 217 | AGGAGAUACACCUCCACCATsT | 218 | AD- |
| | | | | | 9556 |
| 827-845 | uGGuGGAGGuGuAucuccuTsT | 219 | AGGAGAuAcACCUCcACcATsT | 220 | AD- |
| | | | | | 9682 |
| 828-846 | GGUGGAGGUGUAUCUCCUATsT | 221 | UAGGAGAUACACCUCCACCTsT | 222 | AD- |
| | | | | | 9539 |
| 828-846 | GGuGGAGGuGuAucuccuATsT | 223 | uAGGAGAuAcACCUCcACCTsT | 224 | AD- |
| | | | | | 9665 |
| 831-849 | GGAGGUGUAUCUCCUAGACTsT | 225 | GUCUAGGAGAUACACCUCCTsT | 226 | AD- |
| | | | | | 9517 |
| 831-849 | GGAGGuGuAucuccuAGAcTsT | 227 | GUCuAGGAGAuAcACCUCCTsT | 228 | AD- |
| | | | | | 9643 |
| 833-851 | AGGUGUAUCUCCUAGACACTsT | 229 | GUGUCUAGGAGAUACACCUTsT | 230 | AD- |
| | | | | | 9610 |
| 833-851 | AGGuGuAucuccuAGAcAcTsT | 231 | GUGUCuAGGAGAuAcACCUTsT | 232 | AD- |
| | | | | | 9736 |
| 833-851 | AfgGfuGfuAfuCfuCfcUfaGfaCfaC | 233 | p- | 234 | AD- |
| | fTsT | | gUfgUfcUfaGfgAfgAfuAfcAfcCfuTsT | | 14681 |
| 833-851 | AGGUfGUfAUfCfUfCfCfUfAGACfAC | 235 | GUfGUfCfUfAGGAGAUfACfACfCfUfTsT | 236 | AD- |
| | fTsT | | | | 14691 |
| 833-851 | AgGuGuAuCuCcUaGaCaCTsT | 237 | p- | 238 | AD- |
| | | | gUfgUfcUfaGfgAfgAfuAfcAfcCfuTsT | | 14701 |
| 833-851 | AgGuGuAuCuCcUaGaCaCTsT | 239 | GUfGUfCfUfAGGAGAUfACfACfCfUfTsT | 240 | AD- |
| | | | | | 14711 |
| 833-851 | AfgGfuGfuAfuCfuCfcUfaGfaCfaC | 241 | GUGUCuaGGagAUACAccuTsT | 242 | AD- |
| | fTsT | | | | 14721 |
| 833-851 | AGGUfGUfAUfCfUfCfCfUfAGACfAC | 243 | GUGUCuaGGagAUACAccuTsT | 244 | AD- |
| | fTsT | | | | 14731 |
| 833-851 | AgGuGuAuCuCcUaGaCaCTsT | 245 | GUGUCuaGGagAUACAccuTsT | 246 | AD- |
| | | | | | 14741 |
| 833-851 | GfcAfcCfcUfcAfuAfgGfcCfuGfgA | 247 | p- | 248 | AD- |
| | fTsT | | uCfcAfgGfcCfuAfuGfaGfgGfuGfcTsT | | 15087 |
| 833-851 | GCfACfCfCfUfCfAUfAGGCfCfUfGG | 249 | UfCfCfAGGCfCfUfAUfGAGGGUfGCfTsT | 250 | AD- |
| | ATsT | | | | 15097 |
| 833-851 | GcAcCcUcAuAgGcCuGgATsT | 251 | p- | 252 | AD- |
| | | | uCfcAfgGfcCfuAfuGfaGfgGfuGfcTsT | | 15107 |
| 833-851 | GcAcCcUcAuAgGcCuGgATsT | 253 | UfCfCfAGGCfCfUfAUfGAGGGUfGCfTsT | 254 | AD- |
| | | | | | 15117 |
| 833-851 | GfcAfcCfcUfcAfuAfgGfcCfuGfgA | 255 | UCCAGgcCUauGAGGGugcTsT | 256 | AD- |
| | fTsT | | | | 15127 |
| 833-851 | GCfACfCfCfUfCfAUfAGGCfCfUfGG | 257 | UCCAGgcCUauGAGGGugcTsT | 258 | AD- |
| | ATsT | | | | 15137 |
| 833-851 | GcAcCcUcAuAgGcCuGgATsT | 259 | UCCAGgcCUauGAGGGugcTsT | 260 | AD- |
| | | | | | 15147 |
| 836-854 | UGUAUCUCCUAGACACCAGTsT | 261 | CUGGUGUCUAGGAGAUACATsT | 262 | AD- |
| | | | | | 9516 |
| 836-854 | uGuAucuccuAGAcAccAGTsT | 263 | CUGGUGUCuAGGAGAuAcATsT | 264 | AD- |
| | | | | | 9642 |
| 840-858 | UCUCCUAGACACCAGCAUATsT | 265 | UAUGCUGGUGUCUAGGAGATsT | 266 | AD- |
| | | | | | 9562 |
| 840-858 | ucuccuAGAcAccAGcAuATsT | 267 | uAUGCUGGUGUCuAGGAGATsT | 268 | AD- |
| | | | | | 9688 |
| 840-858 | UfcUfcCfuAfgAfcAfcCfaGfcAfuA | 269 | p- | 270 | AD- |
| | fTsT | | uAfuGfcUfgGfuGfuCfuAfgGfaGfaTsT | | 14677 |
| 840-858 | UfCfUfCfCfUfAGACfACfCfAGCfAU | 271 | UfAUfGCfUfGGUfGUfCfUfAGGAGATsT | 272 | AD- |
| | fATsT | | | | 14687 |
| 840-858 | UcUcCuAgAcAcCaGcAuATsT | 273 | p- | 274 | AD- |
| | | | uAfuGfcUfgGfuGfuCfuAfgGfaGfaTsT | | 14697 |
| 840-858 | UcUcCuAgAcAcCaGcAuATsT | 275 | UfAUfGCfUfGGUfGUfCfUfAGGAGATsT | 276 | AD- |
| | | | | | 14707 |
| 840-858 | UfcUfcCfuAafAfcAfcCfaGfcAfuA | 277 | UAUGCugGUguCUAGGagaTsT | 278 | AD- |
| | fTsT | | | | 14717 |
| 840-858 | UfCfUfCfCfUfAGACfACfCfAGCfAU | 279 | UAUGCugGUguCUAGGagaTsT | 280 | AD- |
| | fATsT | | | | 14727 |
| 840-858 | UcUcCuAgAcAcCaGcAuATsT | 281 | UAUGCugGUguCUAGGagaTsT | 282 | AD- |
| | | | | | 14737 |
| 840-858 | AfgGfcCfuGfgAfgUfuUfaUfuCfgG | 283 | p- | 284 | AD- |
| | fTsT | | cCfgAfaUfaAfaCfuCfcAfgGfcCfuTsT | | 15083 |
| 840-858 | AGGCfCfUfGGAGUfUfUfAUfUfCfGG | 285 | CfCfGAAUfAAACfUfCfCfAGGCfCfUfTs | 286 | AD- |
| | TsT | | T | | 15093 |
| 840-858 | AgGcCuGgAgUuUaUuCgGTsT | 287 | p- | 288 | AD- |
| | | | cCfgAfaUfaAfaCfuCfcAfgGfcCfuTsT | | 15103 |
| 840-858 | AgGcCuGgAgUuUaUuCgGTsT | 289 | CfCfGAAUfAAACfUfCfCfAGGCfCfUfTs | 290 | AD- |
| | T | | | | 15113 |
| 840-858 | AfgGfcCfuGfgAfgUfuUfaUfuCfgG | 291 | CCGAAuaAAcuCCAGGccuTsT | 292 | AD- |
| | fTsT | | | | 15123 |
| 840-858 | AGGCfCfUfGGAGUfUfUfAUfUfCfGG | 293 | CCGAAuaAAcuCCAGGccuTsT | 294 | AD- |
| | TsT | | | | 15133 |
| 840-858 | AgGcCuGgAgUuUaUuCgGTsT | 295 | CCGAAuaAAcuCCAGGccuTsT | 296 | AD- |
| | | | | | 15143 |
| 841-859 | CUCCUAGACACCAGCAUACTsT | 297 | GUAUGCUGGUGUCUAGGAGTsT | 298 | AD- |
| | | | | | 9521 |
| 841-859 | cuccuAGAcAccAGcAuAcTsT | 299 | GuAUGCUGGUGUCuAGGAGTsT | 300 | AD- |
| | | | | | 9647 |
| 842-860 | UCCUAGACACCAGCAUACATsT | 301 | UGUAUGCUGGUGUCUAGGATsT | 302 | AD- |
| | | | | | 9611 |
| 842-860 | uccuAGAcAccAGcAuAcATsT | 303 | UGuAUGCUGGUGUCuAGGATsT | 304 | AD- |
| | | | | | 9737 |
| 843-861 | CCUAGACACCAGCAUACAGTsT | 305 | CUGUAUGCUGGUGUCUAGGTsT | 306 | AD- |
| | | | | | 9592 |
| 843-861 | ccuAGAcAccAGcAuAcAGTsT | 307 | CUGuAUGCUGGUGUCuAGGTsT | 308 | AD- |
| | | | | | 9718 |
| 847-865 | GACACCAGCAUACAGAGUGTsT | 309 | CACUCUGUAUGCUGGUGUCTsT | 310 | AD- |
| | | | | | 9561 |
| 847-865 | GAcAccAGcAuAcAGAGuGTsT | 311 | cACUCUGuAUGCUGGUGUCTsT | 312 | AD- |
| | | | | | 9687 |
| 855-873 | CAUACAGAGUGACCACCGGTsT | 313 | CCGGUGGUCACUCUGUAUGTsT | 314 | AD- |
| | | | | | 9636 |
| 855-873 | cAuAcAGAGuGAccAccGGTsT | 315 | CCGGUGGUcACUCUGuAUGTsT | 316 | AD- |
| | | | | | 9762 |
| 860-878 | AGAGUGACCACCGGGAAAUTsT | 317 | AUUUCCCGGUGGUCACUCUTsT | 318 | AD- |
| | | | | | 9540 |
| 860-878 | AGAGuGAccAccGGGAAAuTsT | 319 | AUUUCCCGGUGGUcACUCUTsT | 320 | AD- |
| | | | | | 9666 |
| 861-879 | GAGUGACCACCGGGAAAUCTsT | 321 | GAUUUCCCGGUGGUCACUCTsT | 322 | AD- |
| | | | | | 9535 |
| 861-879 | GAGuGAccAccGGGAAAucTsT | 323 | GAUUUCCCGGUGGUcACUCTsT | 324 | AD- |
| | | | | | 9661 |
| 863-881 | GUGACCACCGGGAAAUCGATsT | 325 | UCGAUUUCCCGGUGGUCACTsT | 326 | AD- |
| | | | | | 9559 |
| 863-881 | GuGAccAccGGGAAAucGATsT | 327 | UCGAUUUCCCGGUGGUcACTsT | 328 | AD- |
| | | | | | 9685 |
| 865-883 | GACCACCGGGAAAUCGAGGTsT | 329 | CCUCGAUUUCCCGGUGGUCTsT | 330 | AD- |
| | | | | | 9533 |
| 865-883 | GAccAccGGGAAAucGAGGTsT | 331 | CCUCGAUUUCCCGGUGGUCTsT | 332 | AD- |
| | | | | | 9659 |
| 866-884 | ACCACCGGGAAAUCGAGGGTsT | 333 | CCCUCGAUUUCCCGGUGGUTsT | 334 | AD- |
| | | | | | 9612 |
| 866-884 | AccAccGGGAAAucGAGGGTsT | 335 | CCCUCGAUUUCCCGGUGGUTsT | 336 | AD- |
| | | | | | 9738 |
| 867-885 | CCACCGGGAAAUCGAGGGCTsT | 337 | GCCCUCGAUUUCCCGGUGGTsT | 338 | AD- |
| | | | | | 9557 |
| 867-885 | ccAccGGGAAAucGAGGGcTsT | 339 | GCCCUCGAUUUCCCGGUGGTsT | 340 | AD- |
| | | | | | 9683 |
| 875-893 | AAAUCGAGGGCAGGGUCAUTsT | 341 | AUGACCCUGCCCUCGAUUUTsT | 342 | AD- |
| | | | | | 9531 |
| 875-893 | AAAucGAGGGcAGGGucAuTsT | 343 | AUGACCCUGCCCUCGAUUUTsT | 344 | AD- |
| | | | | | 9657 |
| 875-893 | AfaAfuCfgAfgGfgCfaGfgGfuCfaU | 345 | p- | 346 | AD- |
| | fTsT | | aUfgAfcCfcUfgCfcCfuCfgAfuUfuTsT | | 14673 |
| 875-893 | AAAUfCfGAGGGCfAGGGUfCfAUfTsT | 347 | AUfGACfCfCfUfGCfCfCfUfCfGAUfUfU | 348 | AD- |
| | fTsT | | | | 14683 |
| 875-893 | AaAuCgAgGgCaGgGuCaUTsT | 349 | p- | 350 | AD- |
| | | | aUfgAfcCfcUfgCfcCfuCfgAfuUfuTsT | | 14693 |
| 875-893 | AaAuCgAgGgCaGgGuCaUTsT | 351 | AUfGACfCfCfUfGCfCfCfUfCfGAUfUfU | 352 | AD- |
| | fTsT | | | | 14703 |
| 875-893 | AfaAfuCfgAfgGfgCfaGfgGfuCfaU | 353 | AUGACccUGccCUCGAuuuTsT | 354 | AD- |
| | fTsT | | | | 14713 |
| 875-893 | AAAUfCfGAGGGCfAGGGUfCfAUfTsT | 355 | AUGACccUGccCUCGAuuuTsT | 356 | AD- |
| | | | | | 14723 |
| 875-893 | AaAuCgAgGgCaGgGuCaUTsT | 357 | AUGACccUGccCUCGAuuuTsT | 358 | AD- |
| | | | | | 14733 |
| 875-893 | CfgGfcAfcCfcUfcAfuAfgGfcCfuG | 359 | p- | 360 | AD- |
| | fTsT | | cAfgGfcCfuAfuGfaGfgGfuGfcCfgTsT | | 15079 |
| 875-893 | CfGGCfACfCfCfUfCfAUfAGGCfCfU | 361 | CfAGGCfCfUfAUfGAGGGUfGCfCfGTsT | 362 | AD- |
| | fGTsT | | | | 15089 |
| 875-893 | CgGcAcCcUcAuAgGcCuGTsT | 363 | p- | 364 | AD- |
| | | | cAfgGfcCfuAfuGfaGfgGfuGfcCfgTsT | | 15099 |
| 875-893 | CgGcAcCcUcAuAgGcCuGTsT | 365 | CfAGGCfCfUfAUfGAGGGUfGCfCfGTsT | 366 | AD- |
| | | | | | 15109 |
| 875-893 | CfgGfcAfcCfcUfcAfuAfgGfcCfuG | 367 | CAGGCcuAUgaGGGUGccgTsT | 368 | AD- |
| | fTsT | | | | 15119 |
| 875-893 | CfGGCfACfCfCfUfCfAUfAGGCfCfU | 369 | CAGGCcuAUgaGGGUGccgTsT | 370 | AD- |
| | fGTsT | | | | 15129 |
| 875-893 | CgGcAcCcUcAuAgGcCuGTsT | 371 | CAGGCcuAUgaGGGUGccgTsT | 372 | AD- |
| | | | | | 15139 |
| 877-895 | AUCGAGGGCAGGGUCAUGGTsT | 373 | CCAUGACCCUGCCCUCGAUTsT | 374 | AD- |
| | | | | | 9542 |
| 877-895 | AucGAGGGcAGGGucAuGGTsT | 375 | CcAUGACCCUGCCCUCGAUTsT | 376 | AD- |
| | | | | | 9668 |
| 878-896 | cGAGGGcAGGGucAuGGucTsT | 377 | GACcAUGACCCUGCCCUCGTsT | 378 | AD- |
| | | | | | 9739 |
| 880-898 | GAGGGCAGGGUCAUGGUCATsT | 379 | UGACCAUGACCCUGCCCUCTsT | 380 | AD- |
| | | | | | 9637 |
| 880-898 | GAGGGcAGGGucAuGGucATsT | 381 | UGACcAUGACCCUGCCCUCTsT | 382 | AD- |
| | | | | | 9763 |
| 882-900 | GGGCAGGGUCAUGGUCACCTsT | 383 | GGUGACCAUGACCCUGCCCTsT | 384 | AD- |
| | | | | | 9630 |
| 882-900 | GGGcAGGGucAuGGucAccTsT | 385 | GGUGACcAUGACCCUGCCCTsT | 386 | AD- |
| | | | | | 9756 |
| 885-903 | CAGGGUCAUGGUCACCGACTsT | 387 | GUCGGUGACCAUGACCCUGTsT | 388 | AD- |
| | | | | | 9593 |
| 885-903 | cAGGGucAuGGucAccGAcTsT | 389 | GUCGGUGACcAUGACCCUGTsT | 390 | AD- |
| | | | | | 9719 |
| 886-904 | AGGGUCAUGGUCACCGACUTsT | 391 | AGUCGGUGACCAUGACCCUTsT | 392 | AD- |
| | | | | | 9601 |
| 886-904 | AGGGucAuGGucAccGAcuTsT | 393 | AGUCGGUGACcAUGACCCUTsT | 394 | AD- |
| | | | | | 9727 |
| 892-910 | AUGGUCACCGACUUCGAGATsT | 395 | UCUCGAAGUCGGUGACCAUTsT | 396 | AD- |
| | | | | | 9573 |
| 892-910 | AuGGucAccGAcuucGAGATsT | 397 | UCUCGAAGUCGGUGACcAUTsT | 398 | AD- |
| | | | | | 9699 |
| 899-917 | CCGACUUCGAGAAUGUGCCTT | 399 | GGCACAUUCUCGAAGUCGGTT | 400 | AD- |
| | | | | | 15228 |
| 921-939 | GGAGGACGGGACCCGCUUCTT | 401 | GAAGCGGGUCCCGUCCUCCTT | 402 | AD- |
| | | | | | 15395 |
| 993-1011 | CAGCGGCCGGGAUGCCGGCTsT | 403 | GCCGGCAUCCCGGCCGCUGTsT | 404 | AD- |
| | | | | | 9602 |
| 993-1011 | cAGcGGccGGGAuGccGGcTsT | 405 | GCCGGcAUCCCGGCCGCUGTsT | 406 | AD- |
| | | | | | 9728 |
| 1020-1038 | GGGUGCCAGCAUGCGCAGCTT | 407 | GCUGCGCAUGCUGGCACCCTT | 408 | AD- |
| | | | | | 15386 |
| 1038-1056 | CCUGCGCGUGCUCAACUGCTsT | 409 | GCAGUUGAGCACGCGCAGGTsT | 410 | AD- |
| | | | | | 9580 |
| 1038-1056 | ccuGcGcGuGcucAAcuGcTsT | 411 | GcAGUUGAGcACGCGcAGGTsT | 412 | AD- |
| | | | | | 9706 |
| 1040-1058 | UGCGCGUGCUCAACUGCCATsT | 413 | UGGCAGUUGAGCACGCGCATsT | 414 | AD- |
| | | | | | 9581 |
| 1040-1058 | uGcGcGuGcucAAcuGccATsT | 415 | UGGcAGUUGAGcACGCGcATsT | 416 | AD- |
| | | | | | 9707 |
| 1042-1060 | CGCGUGCUCAACUGCCAAGTsT | 417 | CUUGGCAGUUGAGCACGCGTsT | 418 | AD- |
| | | | | | 9543 |
| 1042-1060 | cGcGuGcucAAcuGccAAGTsT | 419 | CUUGGcAGUUGAGcACGCGTsT | 420 | AD- |
| | | | | | 9669 |
| 1053-1071 | CUGCCAAGGGAAGGGCACGTsT | 421 | CGUGCCCUUCCCUUGGCAGTsT | 422 | AD- |
| | | | | | 9574 |
| 1053-1071 | cuGccAAGGGAAGGGcAcGTsT | 423 | CGUGCCCUUCCCUUGGcAGTsT | 424 | AD- |
| | | | | | 9700 |
| 1057-1075 | CAAGGGAAGGGCACGGUUATT | 425 | UAACCGUGCCCUUCCCUUGTT | 426 | AD- |
| | | | | | 15320 |
| 1058-1076 | AAGGGAAGGGCACGGUUAGTT | 427 | CUAACCGUGCCCUUCCCUUTT | 428 | AD- |
| | | | | | 15321 |
| 1059-1077 | AGGGAAGGGCACGGUUAGCTT | 429 | GCUAACCGUGCCCUUCCCUTT | 430 | AD- |
| | | | | | 15199 |
| 1060-1078 | GGGAAGGGCACGGUUAGCGTT | 431 | CGCUAACCGUGCCCUUCCCTT | 432 | AD- |
| | | | | | 15167 |
| 1061-1079 | GGAAGGGCACGGUUAGCGGTT | 433 | CCGCUAACCGUGCCCUUCCTT | 434 | AD- |
| | | | | | 15164 |
| 1062-1080 | GAAGGGCACGGUUAGCGGCTT | 435 | GCCGCUAACCGUGCCCUUCTT | 436 | AD- |
| | | | | | 15166 |
| 1063-1081 | AAGGGCACGGUUAGCGGCATT | 437 | UGCCGCUAACCGUGCCCUUTT | 438 | AD- |
| | | | | | 15322 |
| 1064-1082 | AGGGCACGGUUAGCGGCACTT | 439 | GUGCCGCUAACCGUGCCCUTT | 440 | AD- |
| | | | | | 15200 |
| 1068-1086 | CACGGUUAGCGGCACCCUCTT | 441 | GAGGGUGCCGCUAACCGUGTT | 442 | AD- |
| | | | | | 15213 |
| 1069-1087 | ACGGUUAGCGGCACCCUCATT | 443 | UGAGGGUGCCGCUAACCGUTT | 444 | AD- |
| | | | | | 15229 |
| 1072-1090 | GUUAGCGGCACCCUCAUAGTT | 445 | CUAUGAGGGUGCCGCUAACTT | 446 | AD- |
| | | | | | 15215 |
| 1073-1091 | UUAGCGGCACCCUCAUAGGTT | 447 | CCUAUGAGGGUGCCGCUAATT | 448 | AD- |
| | | | | | 15214 |
| 1076-1094 | GCGGCACCCUCAUAGGCCUTsT | 449 | AGGCCUAUGAGGGUGCCGCTsT | 450 | AD- |
| | | | | | 9315 |
| 1079-1097 | GCACCCUCAUAGGCCUGGATsT | 451 | UCCAGGCCUAUGAGGGUGCTsT | 452 | AD- |
| | | | | | 9326 |
| 1085-1103 | UCAUAGGCCUGGAGUUUAUTsT | 453 | AUAAACUCCAGGCCUAUGATsT | 454 | AD- |
| | | | | | 9318 |
| 1090-1108 | GGCCUGGAGUUUAUUCGGATsT | 455 | UCCGAAUAAACUCCAGGCCTsT | 456 | AD- |
| | | | | | 9323 |
| 1091-1109 | GCCUGGAGUUUAUUCGGAATsT | 457 | UUCCGAAUAAACUCCAGGCTsT | 458 | AD- |
| | | | | | 9314 |
| 1091-1109 | GccuGGAGuuuAuucGGAATsT | 459 | UUCCGAAuAAACUCcAGGCTsT | 460 | AD- |
| | | | | | 10792 |
| 1091-1109 | GccuGGAGuuuAuucGGAATsT | 461 | UUCCGAAUAACUCCAGGCTsT | 462 | AD- |
| | | | | | 10796 |
| 1093-1111 | CUGGAGUUUAUUCGGAAAATsT | 463 | UUUUCCGAAUAAACUCCAGTsT | 464 | AD- |
| | | | | | 9638 |
| 1093-1111 | cuGGAGuuuAuucGGAAAATsT | 465 | UUUUCCGAAuAAACUCcAGTsT | 466 | AD- |
| | | | | | 9764 |
| 1095-1113 | GGAGUUUAUUCGGAAAAGCTsT | 467 | GCUUUUCCGAAUAAACUCCTsT | 468 | AD- |
| | | | | | 9525 |
| 1095-1113 | GGAGuuuAuucGGAAAAGcTsT | 469 | GCUUUUCCGAAuAAACUCCTsT | 470 | AD- |
| | | | | | 9651 |
| 1096-1114 | GAGUUUAUUCGGAAAAGCCTsT | 471 | GGCUUUUCCGAAUAAACUCTsT | 472 | AD- |
| | | | | | 9560 |
| 1096-1114 | GAGuuuAuucGGAAAAGccTsT | 473 | GGCUUUUCCGAAuAAACUCTsT | 474 | AD- |
| | | | | | 9686 |
| 1100-1118 | UUAUUCGGAAAAGCCAGCUTsT | 475 | AGCUGGCUUUUCCGAAUAATsT | 476 | AD- |
| | | | | | 9536 |
| 1100-1118 | uuAuucGGAAAAGccAGcuTsT | 477 | AGCUGGCUUUUCCGAAuAATsT | 478 | AD- |
| | | | | | 9662 |
| 1154-1172 | CCCUGGCGGGUGGGUACAGTsT | 479 | CUGUACCCACCCGCCAGGGTsT | 480 | AD- |
| | | | | | 9584 |
| 1154-1172 | cccuGGcGGGuGGGuAcAGTsT | 481 | CUGuACCcACCCGCcAGGGTsT | 482 | AD- |
| | | | | | 9710 |
| 1155-1173 | CCUGGCGGGUGGGUACAGCTT | 483 | GCUGUACCCACCCGCCAGGTT | 484 | AD- |
| | | | | | 15323 |
| 1157-1175 | UGGCGGGUGGGUACAGCCGTsT | 485 | CGGCUGUACCCACCCGCCATsT | 486 | AD- |
| | | | | | 9551 |
| 1157-1175 | uGGcGGGuGGGuAcAGccGTsT | 487 | CGGCUGuACCcACCCGCcATsT | 488 | AD- |
| | | | | | 9677 |
| 1158-1176 | GGCGGGUGGGUACAGCCGCTT | 489 | GCGGCUGUACCCACCCGCCTT | 490 | AD- |
| | | | | | 15230 |
| 1162-1180 | GGUGGGUACAGCCGCGUCCTT | 491 | GGACGCGGCUGUACCCACCTT | 492 | AD- |
| | | | | | 15231 |
| 1164-1182 | UGGGUACAGCCGCGUCCUCTT | 493 | GAGGACGCGGCUGUACCCATT | 494 | AD- |
| | | | | | 15285 |
| 1172-1190 | GCCGCGUCCUCAACGCCGCTT | 495 | GCGGCGUUGAGGACGCGGCTT | 496 | AD- |
| | | | | | 15396 |
| 1173-1191 | CCGCGUCCUCAACGCCGCCTT | 497 | GGCGGCGUUGAGGACGCGGTT | 498 | AD- |
| | | | | | 15397 |
| 1216-1234 | GUCGUGCUGGUCACCGCUGTsT | 499 | CAGCGGUGACCAGCACGACTsT | 500 | AD- |
| | | | | | 9600 |
| 1216-1234 | GucGuGcuGGucAccGcuGTsT | 501 | cAGCGGUGACcAGcACGACTsT | 502 | AD- |
| | | | | | 9726 |
| 1217-1235 | UCGUGCUGGUCACCGCUGCTsT | 503 | GCAGCGGUGACCAGCACGATsT | 504 | AD- |
| | | | | | 9606 |
| 1217-1235 | ucGuGcuGGucAccGcuGcTsT | 505 | GcAGCGGUGACcAGcACGATsT | 506 | AD- |
| | | | | | 9732 |
| 1223-1241 | UGGUCACCGCUGCCGGCAATsT | 507 | UUGCCGGCAGCGGUGACCATsT | 508 | AD- |
| | | | | | 9633 |
| 1223-1241 | uGGucAccGcuGccGGcAATsT | 509 | UUGCCGGcAGCGGUGACcATsT | 510 | AD- |
| | | | | | 9759 |
| 1224-1242 | GGUCACCGCUGCCGGCAACTsT | 511 | GUUGCCGGCAGCGGUGACCTsT | 512 | AD- |
| | | | | | 9588 |
| 1224-1242 | GGucAccGcuGccGGcAAcTsT | 513 | GUUGCCGGcAGCGGUGACCTsT | 514 | AD- |
| | | | | | 9714 |
| 1227-1245 | CACCGCUGCCGGCAACUUCTsT | 515 | GAAGUUGCCGGCAGCGGUGTsT | 516 | AD- |
| | | | | | 9589 |
| 1227-1245 | cAccGcuGccGGcAAcuucTsT | 517 | GAAGUUGCCGGcAGCGGUGTsT | 518 | AD- |
| | | | | | 9715 |
| 1229-1247 | CCGCUGCCGGCAACUUCCGTsT | 519 | CGGAAGUUGCCGGCAGCGGTsT | 520 | AD- |
| | | | | | 9575 |
| 1229-1247 | ccGcuGccGGcAAcuuccGTsT | 521 | CGGAAGUUGCCGGcAGCGGTsT | 522 | AD- |
| | | | | | 9701 |
| 1230-1248 | CGCUGCCGGCAACUUCCGGTsT | 523 | CCGGAAGUUGCCGGCAGCGTsT | 524 | AD- |
| | | | | | 9563 |
| 1230-1248 | cGcuGccGGcAAcuuccGGTsT | 525 | CCGGAAGUUGCCGGcAGCGTsT | 526 | AD- |
| | | | | | 9689 |
| 1231-1249 | GCUGCCGGCAACUUCCGGGTsT | 527 | CCCGGAAGUUGCCGGCAGCTsT | 528 | AD- |
| | | | | | 9594 |
| 1231-1249 | GcuGccGGcAAcuuccGGGTsT | 529 | CCCGGAAGUUGCCGGcAGCTsT | 530 | AD- |
| | | | | | 9720 |
| 1236-1254 | CGGCAACUUCCGGGACGAUTsT | 531 | AUCGUCCCGGAAGUUGCCGTsT | 532 | AD- |
| | | | | | 9585 |
| 1236-1254 | cGGcAAcuuccGGGAcGAuTsT | 533 | AUCGUCCCGGAAGUUGCCGTsT | 534 | AD- |
| | | | | | 9711 |
| 1237-1255 | GGCAACUUCCGGGACGAUGTsT | 535 | CAUCGUCCCGGAAGUUGCCTsT | 536 | AD- |
| | | | | | 9614 |
| 1237-1255 | GGcAAcuuccGGGAcGAuGTsT | 537 | cAUCGUCCCGGAAGUUGCCTsT | 538 | AD- |
| | | | | | 9740 |
| 1243-1261 | UUCCGGGACGAUGCCUGCCTsT | 539 | GGCAGGCAUCGUCCCGGAATsT | 540 | AD- |
| | | | | | 9615 |
| 1243-1261 | uuccGGGAcGAuGccuGccTsT | 541 | GGcAGGcAUCGUCCCGGAATsT | 542 | AD- |
| | | | | | 9741 |
| 1248-1266 | GGACGAUGCCUGCCUCUACTsT | 543 | GUAGAGGCAGGCAUCGUCCTsT | 544 | AD- |
| | | | | | 9534 |
| 1248-1266 | GGACGAUGCCUGCCUCUACTsT | 545 | GUAGAGGCAGGCAUCGUCCTsT | 546 | AD- |
| | | | | | 9534 |
| 1248-1266 | GGAcGAuGccuGccucuAcTsT | 547 | GuAGAGGcAGGcAUCGUCCTsT | 548 | AD- |
| | | | | | 9660 |
| 1279-1297 | GCUCCCGAGGUCAUCACAGTT | 549 | CUGUGAUGACCUCGGGAGCTT | 550 | AD- |
| | | | | | 15324 |
| 1280-1298 | CUCCCGAGGUCAUCACAGUTT | 551 | ACUGUGAUGACCUCGGGAGTT | 552 | AD- |
| | | | | | 15232 |
| 1281-1299 | UCCCGAGGUCAUCACAGUUTT | 553 | AACUGUGAUGACCUCGGGATT | 554 | AD- |
| | | | | | 15233 |
| 1314-1332 | CCAAGACCAGCCGGUGACCTT | 555 | GGUCACCGGCUGGUCUUGGTT | 556 | AD- |
| | | | | | 15234 |
| 1315-1333 | CAAGACCAGCCGGUGACCCTT | 557 | GGGUCACCGGCUGGUCUUGTT | 558 | AD- |
| | | | | | 15286 |
| 1348-1366 | ACCAACUUUGGCCGCUGUGTsT | 559 | CACAGCGGCCAAAGUUGGUTsT | 560 | AD- |
| | | | | | 9590 |
| 1348-1366 | AccAAcuuuGGccGcuGuGTsT | 561 | cAcAGCGGCcAAAGUUGGUTsT | 562 | AD- |
| | | | | | 9716 |
| 1350-1368 | CAACUUUGGCCGCUGUGUGTsT | 563 | CACACAGCGGCCAAAGUUGTsT | 564 | AD- |
| | | | | | 9632 |
| 1350-1368 | cAAcuuuGGccGcuGuGuGTsT | 565 | cAcAcAGCGGCcAAAGUUGTsT | 566 | AD- |
| | | | | | 9758 |
| 1360-1378 | CGCUGUGUGGACCUCUUUGTsT | 567 | CAAAGAGGUCCACACAGCGTsT | 568 | AD- |
| | | | | | 9567 |
| 1360-1378 | cGcuGuGuGGAccucuuuGTsT | 569 | cAAAGAGGUCcAcAcAGCGTsT | 570 | AD- |
| | | | | | 9693 |
| 1390-1408 | GACAUCAUUGGUGCCUCCATsT | 571 | UGGAGGCACCAAUGAUGUCTsT | 572 | AD- |
| | | | | | 9586 |
| 1390-1408 | GAcAucAuuGGuGccuccATsT | 573 | UGGAGGcACcAAUGAUGUCTsT | 574 | AD- |
| | | | | | 9712 |
| 1394-1412 | UCAUUGGUGCCUCCAGCGATsT | 575 | UCGCUGGAGGCACCAAUGATsT | 576 | AD- |
| | | | | | 9564 |
| 1394-1412 | ucAuuGGuGccuccAGcGATsT | 577 | UCGCUGGAGGcACcAAUGATsT | 578 | AD- |
| | | | | | 9690 |
| 1417-1435 | AGCACCUGCUUUGUGUCACTsT | 579 | GUGACACAAAGCAGGUGCUTsT | 580 | AD- |
| | | | | | 9616 |
| 1417-1435 | AGcAccuGcuuuGuGucAcTsT | 581 | GUGAcAcAAAGcAGGUGCUTsT | 582 | AD- |
| | | | | | 9742 |
| 1433-1451 | CACAGAGUGGGACAUCACATT | 583 | UGUGAUGUCCCACUCUGUGTT | 584 | AD- |
| | | | | | 15398 |
| 1486-1504 | AUGCUGUCUGCCGAGCCGGTsT | 585 | CCGGCUCGGCAGACAGCAUTsT | 586 | AD- |
| | | | | | 9617 |
| 1486-1504 | AuGcuGucuGccGAGccGGTsT | 587 | CCGGCUCGGcAGAcAGcAUTsT | 588 | AD- |
| | | | | | 9743 |
| 1491-1509 | GUCUGCCGAGCCGGAGCUCTsT | 589 | GAGCUCCGGCUCGGCAGACTsT | 590 | AD- |
| | | | | | 9635 |
| 1491-1509 | GucuGccGAGccGGAGcucTsT | 591 | GAGCUCCGGCUCGGcAGACTsT | 592 | AD- |
| | | | | | 9761 |
| 1521-1539 | GUUGAGGCAGAGACUGAUCTsT | 593 | GAUCAGUCUCUGCCUCAACTsT | 594 | AD- |
| | | | | | 9568 |
| 1521-1539 | GuuGAGGcAGAGAcuGAucTsT | 595 | GAUcAGUCUCUGCCUcAACTsT | 596 | AD- |
| | | | | | 9694 |
| 1527-1545 | GCAGAGACUGAUCCACUUCTsT | 597 | GAAGUGGAUCAGUCUCUGCTsT | 598 | AD- |
| | | | | | 9576 |
| 1527-1545 | GcAGAGAcuGAuccAcuucTsT | 599 | GAAGUGGAUcAGUCUCUGCTsT | 600 | AD- |
| | | | | | 9702 |
| 1529-1547 | AGAGACUGAUCCACUUCUCTsT | 601 | GAGAAGUGGAUCAGUCUCUTsT | 602 | AD- |
| | | | | | 9627 |
| 1529-1547 | AGAGAcuGAuccAcuucucTsT | 603 | GAGAAGUGGAUcAGUCUCUTsT | 604 | AD- |
| | | | | | 9753 |
| 1543-1561 | UUCUCUGCCAAAGAUGUCATsT | 605 | UGACAUCUUUGGCAGAGAATsT | 606 | AD- |
| | | | | | 9628 |
| 1543-1561 | uucucuGccAAAGAuGucATsT | 607 | UGAcAUCUUUGGcAGAGAATsT | 608 | AD- |
| | | | | | 9754 |
| 1545-1563 | CUCUGCCAAAGAUGUCAUCTsT | 609 | GAUGACAUCUUUGGCAGAGTsT | 610 | AD- |
| | | | | | 9631 |
| 1545-1563 | cucuGccAAAGAuGucAucTsT | 611 | GAUGAcAUCUUUGGcAGAGTsT | 612 | AD- |
| | | | | | 9757 |
| 1580-1598 | CUGAGGACCAGCGGGUACUTsT | 613 | AGUACCCGCUGGUCCUCAGTsT | 614 | AD- |
| | | | | | 9595 |
| 1580-1598 | cuGAGGAccAGcGGGuAcuTsT | 615 | AGuACCCGCUGGUCCUcAGTsT | 616 | AD- |
| | | | | | 9721 |
| 1581-1599 | UGAGGACCAGCGGGUACUGTsT | 617 | CAGUACCCGCUGGUCCUCATsT | 618 | AD- |
| | | | | | 9544 |
| 1581-1599 | uGAGGAccAGcGGGuAcuGTsT | 619 | cAGuACCCGCUGGUCCUcATsT | 620 | AD- |
| | | | | | 9670 |
| 1666-1684 | ACUGUAUGGUCAGCACACUTT | 621 | AGUGUGCUGACCAUACAGUTT | 622 | AD- |
| | | | | | 15235 |
| 1668-1686 | UGUAUGGUCAGCACACUCGTT | 623 | CGAGUGUGCUGACCAUACATT | 624 | AD- |
| | | | | | 15236 |
| 1669-1687 | GUAUGGUCAGCACACUCGGTT | 625 | CCGAGUGUGCUGACCAUACTT | 626 | AD- |
| | | | | | 15168 |
| 1697-1715 | GGAUGGCCACAGCCGUCGCTT | 627 | GCGACGGCUGUGGCCAUCCTT | 628 | AD- |
| | | | | | 15174 |
| 1698-1716 | GAUGGCCACAGCCGUCGCCTT | 629 | GGCGACGGCUGUGGCCAUCTT | 630 | AD- |
| | | | | | 15325 |
| 1806-1824 | CAAGCUGGUCUGCCGGGCCTT | 631 | GGCCCGGCAGACCAGCUUGTT | 632 | AD- |
| | | | | | 15326 |
| 1815-1833 | CUGCCGGGCCCACAACGCUTsT | 633 | AGCGUUGUGGGCCCGGCAGTsT | 634 | AD- |
| | | | | | 9570 |
| 1815-1833 | cuGccGGGcccAcAAcGcuTsT | 635 | AGCGUUGUGGGCCCGGcAGTsT | 636 | AD- |
| | | | | | 9696 |
| 1816-1834 | UGCCGGGCCCACAACGCUUTsT | 637 | AAGCGUUGUGGGCCCGGCATsT | 638 | AD- |
| | | | | | 9566 |
| 1816-1834 | uGccGGGcccAcAAcGcuuTsT | 639 | AAGCGUUGUGGGCCCGGcATsT | 640 | AD- |
| | | | | | 9692 |
| 1818-1836 | CCGGGCCCACAACGCUUUUTsT | 641 | AAAAGCGUUGUGGGCCCGGTsT | 642 | AD- |
| | | | | | 9532 |
| 1818-1836 | ccGGGcccAcAAcGcuuuuTsT | 643 | AAAAGCGUUGUGGGCCCGGTsT | 644 | AD- |
| | | | | | 9658 |
| 1820-1838 | GGGCCCACAACGCUUUUGGTsT | 645 | CCAAAAGCGUUGUGGGCCCTsT | 646 | AD- |
| | | | | | 9549 |
| 1820-1838 | GGGcccAcAAcGcuuuuGGTsT | 647 | CcAAAAGCGUUGUGGGCCCTsT | 648 | AD- |
| | | | | | 9675 |
| 1840-1858 | GGUGAGGGUGUCUACGCCATsT | 649 | UGGCGUAGACACCCUCACCTsT | 650 | AD- |
| | | | | | 9541 |
| 1840-1858 | GGuGAGGGuGucuAcGccATsT | 651 | UGGCGuAGAcACCCUcACCTsT | 652 | AD- |
| | | | | | 9667 |
| 1843-1861 | GAGGGUGUCUACGCCAUUGTsT | 653 | CAAUGGCGUAGACACCCUCTsT | 654 | AD- |
| | | | | | 9550 |
| 1843-1861 | GAGGGuGucuAcGccAuuGTsT | 655 | cAAUGGCGuAGAcACCCUCTsT | 656 | AD- |
| | | | | | 9676 |
| 1861-1879 | GCCAGGUGCUGCCUGCUACTsT | 657 | GUAGCAGGCAGCACCUGGCTsT | 658 | AD- |
| | | | | | 9571 |
| 1861-1879G | ccAGGuGcuGccuGcuAcTsT | 659 | GuAGcAGGcAGcACCUGGCTsT | 660 | AD- |
| | | | | | 9697 |
| 1862-1880 | CCAGGUGCUGCCUGCUACCTsT | 661 | GGUAGCAGGCAGCACCUGGTsT | 662 | AD- |
| | | | | | 9572 |
| 1862-1880 | ccAGGuGcuGccuGcuAccTsT | 663 | GGuAGcAGGcAGcACCUGGTsT | 664 | AD- |
| | | | | | 9698 |
| 2008-2026 | ACCCACAAGCCGCCUGUGCTT | 665 | GCACAGGCGGCUUGUGGGUTT | 666 | AD- |
| | | | | | 15327 |
| 2023-2041 | GUGCUGAGGCCACGAGGUCTsT | 667 | GACCUCGUGGCCUCAGCACTsT | 668 | AD- |
| | | | | | 9639 |
| 2023-2041 | GuGcuGAGGccAcGAGGucTsT | 669 | GACCUCGUGGCCUcAGcACTsT | 670 | AD- |
| | | | | | 9765 |
| 2024-2042 | UGCUGAGGCCACGAGGUCATsT | 671 | UGACCUCGUGGCCUCAGCATsT | 672 | AD- |
| | | | | | 9518 |
| 2024-2042 | UGCUGAGGCCACGAGGUCATsT | 673 | UGACCUCGUGGCCUCAGCATsT | 674 | AD- |
| | | | | | 9518 |
| 2024-2042 | uGcuGAGGccAcGAGGucATsT | 675 | UGACCUCGUGGCCUcAGcATsT | 676 | AD- |
| | | | | | 9644 |
| 2024-2042 | UfgCfuGfaGfgCfcAfcGfaGfgUfCA | 677 | p- | 678 | AD- |
| | fTsT | | uGfaCfcUfcGfuGfgCfcUfcAfgCfaTsT | | 14672 |
| 2024-2042 | UfGCfUfGAGGCfCfACfGAGGUfCfAT | 679 | UfGACfCfUfCfGUfGGCfCfUfCfAGCfAT | 680 | AD- |
| | ST | | ST | | 14682 |
| 2024-2042 | UgCuGaGgCcAcGaGgUcATsT | 681 | p- | 682 | AD- |
| | | | uGfaCfcUfcGfuGfgCfcUfcAfgCfaTsT | | 14692 |
| 2024-2042 | UgCuGaGgCcAcGaGgUcATsT | 683 | UfGACfCfUfCfGUfGGCfCfUfCfAGCfAT | 684 | AD- |
| | | | sT | | 14702 |
| 2024-2042 | UfgCfuGfaGfgCfcAfcGfaGfgUfCA | 685 | UGACCucGUggCCUCAgcaTsT | 686 | AD- |
| | fTsT | | | | 14712 |
| 2024-2042 | UfGCfUfGAGGCfCfACfGAGGUfCfAT | 687 | UGACCucGUggCCUCAgcaTsT | 688 | AD- |
| | ST | | | | 14722 |
| 2024-2042 | UgCuGaGgCcAcGaGgUcATsT | 689 | UGACCucGUggCCUCAgcaTsT | 690 | AD- |
| | | | | | 14732 |
| 2024-2042 | GfuGfgUfcAfgCfgGfcCfgGfgAfuG | 691 | p- | 692 | AD- |
| | fTsT | | cAfuCfcCfgGfcCfgCfuGfaCfcAfcTsT | | 15078 |
| 2024-2042 | GUfGGUfCfAGCfGGCfCfGGGAUfGTs | 693 | CfAUfCfCfCfGGCfCfGCfUfGACfCfACf | 694 | AD- |
| | T | | TsT | | 15088 |
| 2024-2042 | GuGgUcAgCgGcCgGgAuGTsT | 695 | p- | 696 | AD- |
| | | | cAfuCfcCfgGfcCfgCfuGfaCfcAfcTsT | | 15098 |
| 2024-2042 | GuGgUcAgCgGcCgGgAuGTsT | 697 | CfAUfCfCfCfGGCfCfGCfUfGACfCfACf | 698 | AD- |
| | | | TsT | | 15108 |
| 2024-2042 | GfuGfgUfcAfgCfgGfcCfgGfgAfuG | 699 | CAUCCcgGCcgCUGACcacTsT | 700 | AD- |
| | fTsT | | | | 15118 |
| 2024-2042 | GUfGGUfCfAGCfGGCfCfGGGAUfGTs | 701 | CAUCCcgGCcgCUGACcacTsT | 702 | AD- |
| | T | | | | 15128 |
| 2024-2042 | GuGgUcAgCgGcCgGgAuGTsT | 703 | CAUCCcgGCcgCUGACcacTsT | 704 | AD- |
| | | | | | 15138 |
| 2030-2048 | GGCCACGAGGUCAGCCCAATT | 705 | UUGGGCUGACCUCGUGGCCTT | 706 | AD- |
| | | | | | 15237 |
| 2035-2053 | CGAGGUCAGCCCAACCAGUTT | 707 | ACUGGUUGGGCUGACCUCGTT | 708 | AD- |
| | | | | | 15287 |
| 2039-2057 | GUCAGCCCAACCAGUGCGUTT | 709 | ACGCACUGGUUGGGCUGACTT | 710 | AD- |
| | | | | | 15238 |
| 2041-2059 | CAGCCCAACCAGUGCGUGGTT | 711 | CCACGCACUGGUUGGGCUGTT | 712 | AD- |
| | | | | | 15328 |
| 2062-2080 | CACAGGGAGGCCAGCAUCCTT | 713 | GGAUGCUGGCCUCCCUGUGTT | 714 | AD- |
| | | | | | 15399 |
| 2072-2090 | CCAGCAUCCACGCUUCCUGTsT | 715 | CAGGAAGCGUGGAUGCUGGTsT | 716 | AD- |
| | | | | | 9582 |
| 2072-2090 | ccAGcAuccAcGcuuccuGTsT | 717 | cAGGAAGCGUGGAUGCUGGTsT | 718 | AD- |
| | | | | | 9708 |
| 2118-2136 | AGUCAAGGAGCAUGGAAUCTsT | 719 | GAUUCCAUGCUCCUUGACUTsT | 720 | AD- |
| | | | | | 9545 |
| 2118-2136 | AGucAAGGAGcAuGGAAucTsT | 721 | GAUUCcAUGCUCCUUGACUTsT | 722 | AD- |
| | | | | | 9671 |
| 2118-2136 | AfgUfcAfaGfgAfgCfaUfgGfaAfuC | 723 | p- | 724 | AD- |
| | fTsT | | gAfuUfcCfaUfgCfuCfcUfuGfaCfuTsT | | 14674 |
| 2118-2136 | AGUfCfAAGGAGCfAUfGGAAUfCfTsT | 725 | GAUfUfCfCfAUfGCfUfCfCfUfUfGACfU | 726 | AD- |
| | | | fTsT | | 14684 |
| 2118-2136 | AgUcAaGgAgCaUgGaAuCTsT | 727 | p- | 728 | AD- |
| | | | gAfuUfcCfaUfgCfuCfcUfuGfaCfuTsT | | 14694 |
| 2118-2136 | AgUcAaGgAgCaUgGaAuCTsT | 729 | GAUfUfCfCfAUfGCfUfCfCfUfUfGACfU | 730 | AD- |
| | | | fTsT | | 14704 |
| 2118-2136 | AfgUfcAfaGfgAfgCfaUfgGfaAfuC | 731 | GAUUCcaUGcuCCUUGacuTsT | 732 | AD- |
| | fTsT | | | | 14714 |
| 2118-2136 | AGUfCfAAGGAGCfAUfGGAAUfCfTsT | 733 | GAUUCcaUGcuCCUUGacuTsT | 734 | AD- |
| | | | | | 14724 |
| 2118-2136 | AgUcAaGgAgCaUgGaAuCTsT | 735 | GAUUCcaUGcuCCUUGacuTsT | 736 | AD- |
| | | | | | 14734 |
| 2118-2136 | GfcGfgCfaCfcCfuCfaUfaGfgCfcU | 737 | p- | 738 | AD- |
| | fTsT | | aGfgCfcUfaUfgAfgGfgUfgCfcGfcTsT | | 15080 |
| 2118-2136 | GCfGGCfACfCfCfUfCfAUfAGGCfCf | 739 | AGGCfCfUfAUfGAGGGUfGCfCfGCfTsT | 740 | AD- |
| | UfTsT | | | | 15090 |
| 2118-2136 | GcGgCaCcCuCaUaGgCcUTsT | 741 | p- | 742 | AD- |
| | | | aGfgCfcUfaUfgAfgGfgUfgCfcGfcTsT | | 15100 |
| 2118-2136 | GcGgCaCcCuCaUaGgCcUTsT | 743 | AGGCfCfUfAUfGAGGGUfGCfCfGCfTsT | 744 | AD- |
| | | | | | 15110 |
| 2118-2136 | GfcGfgCfaCfcCfuCfaUfaGfgCfcU | 745 | AGGCCuaUGagGGUGCcgcTsT | 746 | AD- |
| | fTsT | | | | 15120 |
| 2118-2136 | GCfGGCfACfCfCfUfCfAUfAGGCfCf | 747 | AGGCCuaUGagGGUGCcgcTsT | 748 | AD- |
| | UfTsT | | | | 15130 |
| 2118-2136 | GcGgCaCcCuCaUaGgCcUTsT | 749 | AGGCCuaUGagGGUGCcgcTsT | 750 | AD- |
| | | | | | 15140 |
| 2122-2140 | AAGGAGCAUGGAAUCCCGGTsT | 751 | CCGGGAUUCCAUGCUCCUUTsT | 752 | AD- |
| | | | | | 9522 |
| 2122-2140 | AAGGAGcAuGGAAucccGGTsT | 753 | CCGGGAUUCcAUGCUCCUUTsT | 754 | AD- |
| | | | | | 9648 |
| 2123-2141 | AGGAGCAUGGAAUCCCGGCTsT | 755 | GCCGGGAUUCCAUGCUCCUTsT | 756 | AD- |
| | | | | | 9552 |
| 2123-2141 | AGGAGcAuGGAAucccGGcTsT | 757 | GCCGGGAUUCcAUGCUCCUTsT | 758 | AD- |
| | | | | | 9678 |
| 2125-2143 | GAGCAUGGAAUCCCGGCCCTsT | 759 | GGGCCGGGAUUCCAUGCUCTsT | 760 | AD- |
| | | | | | 9618 |
| 2125-2143 | GAGcAuGGAAucccGGcccTsT | 761 | GGGCCGGGAUUCcAUGCUCTsT | 762 | AD- |
| | | | | | 9744 |
| 2230-2248 | GCCUACGCCGUAGACAACATT | 763 | UGUUGUCUACGGCGUAGGCTT | 764 | AD- |
| | | | | | 15239 |
| 2231-2249 | CCUACGCCGUAGACAACACTT | 765 | GUGUUGUCUACGGCGUAGGTT | 766 | AD- |
| | | | | | 15212 |
| 2232-2250 | CUACGCCGUAGACAACACGTT | 767 | CGUGUUGUCUACGGCGUAGTT | 768 | AD- |
| | | | | | 15240 |
| 2233-2251 | UACGCCGUAGACAACACGUTT | 769 | ACGUGUUGUCUACGGCGUATT | 770 | AD- |
| | | | | | 15177 |
| 2235-2253 | CGCCGUAGACAACACGUGUTT | 771 | ACACGUGUUGUCUACGGCGTT | 772 | AD- |
| | | | | | 15179 |
| 2236-2254 | GCCGUAGACAACACGUGUGTT | 773 | CACACGUGUUGUCUACGGCTT | 774 | AD- |
| | | | | | 15180 |
| 2237-2255 | CCGUAGACAACACGUGUGUTT | 775 | ACACACGUGUUGUCUACGGTT | 776 | AD- |
| | | | | | 15241 |
| 2238-2256 | CGUAGACAACACGUGUGUATT | 777 | UACACACGUGUUGUCUACGTT | 778 | AD- |
| | | | | | 15268 |
| 2240-2258 | UAGACAACACGUGUGUAGUTT | 779 | ACUACACACGUGUUGUCUATT | 780 | AD- |
| | | | | | 15242 |
| 2241-2259 | AGACAACACGUGUGUAGUCTT | 781 | GACUACACACGUGUUGUCUTT | 782 | AD- |
| | | | | | 15216 |
| 2242-2260 | GACAACACGUGUGUAGUCATT | 783 | UGACUACACACGUGUUGUCTT | 784 | AD- |
| | | | | | 15176 |
| 2243-2261 | ACAACACGUGUGUAGUCAGTT | 785 | CUGACUACACACGUGUUGUTT | 786 | AD- |
| | | | | | 15181 |
| 2244-2262 | CAACACGUGUGUAGUCAGGTT | 787 | CCUGACUACACACGUGUUGTT | 788 | AD- |
| | | | | | 15243 |
| 2247-2265 | CACGUGUGUAGUCAGGAGCTT | 789 | GCUCCUGACUACACACGUGTT | 790 | AD- |
| | | | | | 15182 |
| 2248-2266 | ACGUGUGUAGUCAGGAGCCTT | 791 | GGCUCCUGACUACACACGUTT | 792 | AD- |
| | | | | | 15244 |
| 2249-2267 | CGUGUGUAGUCAGGAGCCGTT | 793 | CGGCUCCUGACUACACACGTT | 794 | AD- |
| | | | | | 15387 |
| 2251-2269 | UGUGUAGUCAGGAGCCGGGTT | 795 | CCCGGCUCCUGACUACACATT | 796 | AD- |
| | | | | | 15245 |
| 2257-2275 | GUCAGGAGCCGGGACGUCATsT | 797 | UGACGUCCCGGCUCCUGACTsT | 798 | AD- |
| | | | | | 9555 |
| 2257-2275 | GucAGGAGccGGGAcGucATsT | 799 | UGACGUCCCGGCUCCUGACTsT | 800 | AD- |
| | | | | | 9681 |
| 2258-2276 | UCAGGAGCCGGGACGUCAGTsT | 801 | CUGACGUCCCGGCUCCUGATsT | 802 | AD- |
| | | | | | 9619 |
| 2258-2276 | ucAGGAGccGGGAcGucAGTsT | 803 | CUGACGUCCCGGCUCCUGATsT | 804 | AD- |
| | | | | | 9745 |
| 2259-2277 | CAGGAGCCGGGACGUCAGCTsT | 805 | GCUGACGUCCCGGCUCCUGTsT | 806 | AD- |
| | | | | | 9620 |
| 2259-2277 | cAGGAGccGGGAcGucAGcTsT | 807 | GCUGACGUCCCGGCUCCUGTsT | 808 | AD- |
| | | | | | 9746 |
| 2263-2281 | AGCCGGGACGUCAGCACUATT | 809 | UAGUGCUGACGUCCCGGCUTT | 810 | AD- |
| | | | | | 15288 |
| 2265-2283 | CCGGGACGUCAGCACUACATT | 811 | UGUAGUGCUGACGUCCCGGTT | 812 | AD- |
| | | | | | 15246 |
| 2303-2321 | CCGUGACAGCCGUUGCCAUTT | 813 | AUGGCAACGGCUGUCACGGTT | 814 | AD- |
| | | | | | 15289 |
| 2317-2335 | GCCAUCUGCUGCCGGAGCCTsT | 815 | GGCUCCGGCAGCAGAUGGCTsT | 816 | AD- |
| | | | | | 9324 |
| 2375-2393 | CCCAUCCCAGGAUGGGUGUTT | 817 | ACACCCAUCCUGGGAUGGGTT | 818 | AD- |
| | | | | | 15329 |
| 2377-2395 | CAUCCCAGGAUGGGUGUCUTT | 819 | AGACACCCAUCCUGGGAUGTT | 820 | AD- |
| | | | | | 15330 |
| 2420-2438 | AGCUUUAAAAUGGUUCCGATT | 821 | UCGGAACCAUUUUAAAGCUTT | 822 | AD- |
| | | | | | 15169 |
| 2421-2439 | GCUUUAAAAUGGUUCCGACTT | 823 | GUCGGAACCAUUUUAAAGCTT | 824 | AD- |
| | | | | | 15201 |
| 2422-2440 | CUUUAAAAUGGUUCCGACUTT | 825 | AGUCGGAACCAUUUUAAAGTT | 826 | AD- |
| | | | | | 15331 |
| 2423-2441 | UUUAAAAUGGUUCCGACUUTT | 827 | AAGUCGGAACCAUUUUAAATT | 828 | AD- |
| | | | | | 15190 |
| 2424-2442 | UUAAAAUGGUUCCGACUUGTT | 829 | CAAGUCGGAACCAUUUUAATT | 830 | AD- |
| | | | | | 15247 |
| 2425-2443 | UAAAAUGGUUCCGACUUGUTT | 831 | ACAAGUCGGAACCAUUUUATT | 832 | AD- |
| | | | | | 15248 |
| 2426-2444 | AAAAUGGUUCCGACUUGUCTT | 833 | GACAAGUCGGAACCAUUUUTT | 834 | AD- |
| | | | | | 15175 |
| 2427-2445 | AAAUGGUUCCGACUUGUCCTT | 835 | GGACAAGUCGGAACCAUUUTT | 836 | AD- |
| | | | | | 15249 |
| 2428-2446 | AAUGGUUCCGACUUGUCCCTT | 837 | GGGACAAGUCGGAACCAUUTT | 838 | AD- |
| | | | | | 15250 |
| 2431-2449 | GGUUCCGACUUGUCCCUCUTT | 839 | AGAGGGACAAGUCGGAACCTT | 840 | AD- |
| | | | | | 15400 |
| 2457-2475 | CUCCAUGGCCUGGCACGAGTT | 841 | CUCGUGCCAGGCCAUGGAGTT | 842 | AD- |
| | | | | | 15332 |
| 2459-2477 | CCAUGGCCUGGCACGAGGGTT | 843 | CCCUCGUGCCAGGCCAUGGTT | 844 | AD- |
| | | | | | 15388 |
| 2545-2563 | GAACUCACUCACUCUGGGUTT | 845 | ACCCAGAGUGAGUGAGUUCTT | 846 | AD- |
| | | | | | 15333 |
| 2549-2567 | UCACUCACUCUGGGUGCCUTT | 847 | AGGCACCCAGAGUGAGUGATT | 848 | AD- |
| | | | | | 15334 |
| 2616-2634 | UUUCACCAUUCAAACAGGUTT | 849 | ACCUGUUUGAAUGGUGAAATT | 850 | AD- |
| | | | | | 15335 |
| 2622-2640 | CAUUCAAACAGGUCGAGCUTT | 851 | AGCUCGACCUGUUUGAAUGTT | 852 | AD- |
| | | | | | 15183 |
| 2623-2641 | AUUCAAACAGGUCGAGCUGTT | 853 | CAGCUCGACCUGUUUGAAUTT | 854 | AD- |
| | | | | | 15202 |
| 2624-2642 | UUCAAACAGGUCGAGCUGUTT | 855 | ACAGCUCGACCUGUUUGAATT | 856 | AD- |
| | | | | | 15203 |
| 2625-2643 | UCAAACAGGUCGAGCUGUGTT | 857 | CACAGCUCGACCUGUUUGATT | 858 | AD- |
| | | | | | 15272 |
| 2626-2644 | CAAACAGGUCGAGCUGUGCTT | 859 | GCACAGCUCGACCUGUUUGTT | 860 | AD- |
| | | | | | 15217 |
| 2627-2645 | AAACAGGUCGAGCUGUGCUTT | 861 | AGCACAGCUCGACCUGUUUTT | 862 | AD- |
| | | | | | 15290 |
| 2628-2646 | AACAGGUCGAGCUGUGCUCTT | 863 | GAGCACAGCUCGACCUGUUTT | 864 | AD- |
| | | | | | 15218 |
| 2630-2648 | CAGGUCGAGCUGUGCUCGGTT | 865 | CCGAGCACAGCUCGACCUGTT | 866 | AD- |
| | | | | | 15389 |
| 2631-2649 | AGGUCGAGCUGUGCUCGGGTT | 867 | CCCGAGCACAGCUCGACCUTT | 868 | AD- |
| | | | | | 15336 |
| 2633-2651 | GUCGAGCUGUGCUCGGGUGTT | 869 | CACCCGAGCACAGCUCGACTT | 870 | AD- |
| | | | | | 15337 |
| 2634-2652 | UCGAGCUGUGCUCGGGUGCTT | 871 | GCACCCGAGCACAGCUCGATT | 872 | AD- |
| | | | | | 15191 |
| 2657-2675 | UCGAGCUGUGCUCGGGUGCTT | 873 | CGGCACAUUGGGAGCAGCUTT | 874 | AD- |
| | | | | | 15390 |
| 2658-2676 | GCUGCUCCCAAUGUGCCGATT | 875 | UCGGCACAUUGGGAGCAGCTT | 876 | AD- |
| | | | | | 15338 |
| 2660-2678 | UGCUCCCAAUGUGCCGAUGTT | 877 | CAUCGGCACAUUGGGAGCATT | 878 | AD- |
| | | | | | 15204 |
| 2663-2681 | UCCCAAUGUGCCGAUGUCCTT | 879 | GGACAUCGGCACAUUGGGATT | 880 | AD- |
| | | | | | 15251 |
| 2665-2683 | CCAAUGUGCCGAUGUCCGUTT | 881 | ACGGACAUCGGCACAUUGGTT | 882 | AD- |
| | | | | | 15205 |
| 2666-2684 | CAAUGUGCCGAUGUCCGUGTT | 883 | CACGGACAUCGGCACAUUGTT | 884 | AD- |
| | | | | | 15171 |
| 2667-2685 | AAUGUGCCGAUGUCCGUGGTT | 885 | CCACGGACAUCGGCACAUUTT | 886 | AD- |
| | | | | | 15252 |
| 2673-2691 | CCGAUGUCCGUGGGCAGAATT | 887 | UUCUGCCCACGGACAUCGGTT | 888 | AD- |
| | | | | | 15339 |
| 2675-2693 | GAUGUCCGUGGGCAGAAUGTT | 889 | CAUUCUGCCCACGGACAUCTT | 890 | AD- |
| | | | | | 15253 |
| 2678-2696 | GUCCGUGGGCAGAAUGACUTT | 891 | AGUCAUUCUGCCCACGGACTT | 892 | AD- |
| | | | | | 15340 |
| 2679-2697 | UCCGUGGGCAGAAUGACUUTT | 893 | AAGUCAUUCUGCCCACGGATT | 894 | AD- |
| | | | | | 15291 |
| 2683-2701 | UGGGCAGAAUGACUUUUAUTT | 895 | AUAAAAGUCAUUCUGCCCATT | 896 | AD- |
| | | | | | 15341 |
| 2694-2712 | ACUUUUAUUGAGCUCUUGUTT | 897 | ACAAGAGCUCAAUAAAAGUTT | 898 | AD- |
| | | | | | 15401 |
| 2700-2718 | AUUGAGCUCUUGUUCCGUGTT | 899 | CACGGAACAAGAGCUCAAUTT | 900 | AD- |
| | | | | | 15342 |
| 2704-2722 | AGCUCUUGUUCCGUGCCAGTT | 901 | CUGGCACGGAACAAGAGCUTT | 902 | AD- |
| | | | | | 15343 |
| 2705-2723 | GCUCUUGUUCCGUGCCAGGTT | 903 | CCUGGCACGGAACAAGAGCTT | 904 | AD- |
| | | | | | 15292 |
| 2710-2728 | UGUUCCGUGCCAGGCAUUCTT | 905 | GAAUGCCUGGCACGGAACATT | 906 | AD- |
| | | | | | 15344 |
| 2711-2729 | GUUCCGUGCCAGGCAUUCATT | 907 | UGAAUGCCUGGCACGGAACTT | 908 | AD- |
| | | | | | 15254 |
| 2712-2730 | UUCCGUGCCAGGCAUUCAATT | 909 | UUGAAUGCCUGGCACGGAATT | 910 | AD- |
| | | | | | 15345 |
| 2715-2733 | CGUGCCAGGCAUUCAAUCCTT | 911 | GGAUUGAAUGCCUGGCACGTT | 912 | AD- |
| | | | | | 15206 |
| 2716-2734 | GUGCCAGGCAUUCAAUCCUTT | 913 | AGGAUUGAAUGCCUGGCACTT | 914 | AD- |
| | | | | | 15346 |
| 2728-2746 | CAAUCCUCAGGUCUCCACCTT | 915 | GGUGGAGACCUGAGGAUUGTT | 916 | AD- |
| | | | | | 15347 |
| 2743-2761 | CACCAAGGAGGCAGGAUUCTsT | 917 | GAAUCCUGCCUCCUUGGUGTsT | 918 | AD- |
| | | | | | 9577 |
| 2743-2761 | cAccAAGGAGGcAGGAuucTsT | 919 | GAAUCCUGCCUCCUUGGUGTsT | 920 | AD- |
| | | | | | 9703 |
| 2743-2761 | CfaCfcAfaGfgAfgGfcAfgGfaUfuC | 921 | p- | 922 | AD- |
| | fTsT | | gAfaUfcCfuGfcCfuCfcUfuGfgUfgTsT | | 14678 |
| 2743-2761 | CfACfCfAAGGAGGCfAGGAUfUfCfTs | 923 | GAAUfCfCfUfGCfCfUfCfCfUfUfGGUfG | 924 | AD- |
| | T | | TsT | | 14688 |
| 2743-2761 | CaCcAaGgAgGcAgGaUuCTsT | 925 | p- | 926 | AD- |
| | | | gAfaUfcCfuGfcCfuCfcUfuGfgUfgTsT | | 14698 |
| 2743-2761 | CaCcAaGgAgGcAgGaUuCTsT | 927 | GAAUfCfCfUfGCfCfUfCfCfUfUfGGUfG | 928 | AD- |
| | | | TsT | | 14708 |
| 2743-2761 | CfaCfcAfaGfgAfgGfcAfgGfaUfuC | 929 | GAAUCcuGCcuCCUUGgugTsT | 930 | AD- |
| | fTsT | | | | 14718 |
| 2743-2761 | CfACfCfAAGGAGGCfAGGAUfUfCfTs | 931 | GAAUCcuGCcuCCUUGgugTsT | 932 | AD- |
| | T | | | | 14728 |
| 2743-2761 | CaCcAaGgAgGcAgGaUuCTsT | 933 | GAAUCcuGCcuCCUUGgugTsT | 934 | AD- |
| | | | | | 14738 |
| 2743-2761 | GfgCfcUfgGfaGfuUfuAfuUfcGfgA | 935 | p- | 936 | AD- |
| | fTsT | | uCfcGfaAfuAfaAfcUfcCfaGfgCfcTsT | | 15084 |
| 2743-2761 | GGCfCfUfGGAGUfUfUfAUfUfCfGGA | 937 | UfCfCfGAAUfAAACfUfCfCfAGGCfCfTs | 938 | AD- |
| | TsT | | T | | 15094 |
| 2743-2761 | GgCcUgGaGuUuAuUcGgATsT | 939 | p- | 940 | AD- |
| | | | uCfcGfaAfuAfaAfcUfcCfaGfgCfcTsT | | 15104 |
| 2743-2761 | GgCcUgGaGuUuAuUcGgATsT | 941 | UfCfCfGAAUfAAACfUfCfCfAGGCfCfTs | 942 | AD- |
| | | | T | | 15114 |
| 2743-2761 | GfgCfcUfgGfaGfuUfuAfuUfcGfgA | 943 | UCCGAauAAacUCCAGgccTsT | 944 | AD- |
| | fTsT | | | | 15124 |
| 2743-2761 | GGCfCfUfGGAGUfUfUfAUfUfCfGGA | 945 | UCCGAauAAacUCCAGgccTsT | 946 | AD- |
| | TsT | | | | 15134 |
| 2743-2761 | GgCcUgGaGuUuAuUcGgATsT | 947 | UCCGAauAAacUCCAGgccTsT | 948 | AD- |
| | | | | | 15144 |
| 2753-2771 | GCAGGAUUCUUCCCAUGGATT | 949 | UCCAUGGGAAGAAUCCUGCTT | 950 | AD- |
| | | | | | 15391 |
| 2794-2812 | UGCAGGGACAAACAUCGUUTT | 951 | AACGAUGUUUGUCCCUGCATT | 952 | AD- |
| | | | | | 15348 |
| 2795-2813 | GCAGGGACAAACAUCGUUGTT | 953 | CAACGAUGUUUGUCCCUGCTT | 954 | AD- |
| | | | | | 15349 |
| 2797-2815 | AGGGACAAACAUCGUUGGGTT | 955 | CCCAACGAUGUUUGUCCCUTT | 956 | AD- |
| | | | | | 15170 |
| 2841-2859 | CCCUCAUCUCCAGCUAACUTT | 957 | AGUUAGCUGGAGAUGAGGGTT | 958 | AD- |
| | | | | | 15350 |
| 2845-2863 | CAUCUCCAGCUAACUGUGGTT | 959 | CCACAGUUAGCUGGAGAUGTT | 960 | AD- |
| | | | | | 15402 |
| 2878-2896 | GCUCCCUGAUUAAUGGAGGTT | 961 | CCUCCAUUAAUCAGGGAGCTT | 962 | AD- |
| | | | | | 15293 |
| 2881-2899 | CCCUGAUUAAUGGAGGCUUTT | 963 | AAGCCUCCAUUAAUCAGGGTT | 964 | AD- |
| | | | | | 15351 |
| 2882-2900 | CCUGAUUAAUGGAGGCUUATT | 965 | UAAGCCUCCAUUAAUCAGGTT | 966 | AD- |
| | | | | | 15403 |
| 2884-2902 | UGAUUAAUGGAGGCUUAGCTT | 967 | GCUAAGCCUCCAUUAAUCATT | 968 | AD- |
| | | | | | 15404 |
| 2885-2903 | GAUUAAUGGAGGCUUAGCUTT | 969 | AGCUAAGCCUCCAUUAAUCTT | 970 | AD- |
| | | | | | 15207 |
| 2886-2904 | AUUAAUGGAGGCUUAGCUUTT | 971 | AAGCUAAGCCUCCAUUAAUTT | 972 | AD- |
| | | | | | 15352 |
| 2887-2905 | UUAAUGGAGGCUUAGCUUUTT | 973 | AAAGCUAAGCCUCCAUUAATT | 974 | AD- |
| | | | | | 15255 |
| 2903-2921 | UUUCUGGAUGGCAUCUAGCTsT | 975 | GCUAGAUGCCAUCCAGAAATsT | 976 | AD- |
| | | | | | 9603 |
| 2903-2921 | uuucuGGAuGGcAucuAGcTsT | 977 | GCuAGAUGCcAUCcAGAAATsT | 978 | AD- |
| | | | | | 9729 |
| 2904-2922 | UUCUGGAUGGCAUCUAGCCTsT | 979 | GGCUAGAUGCCAUCCAGAATsT | 980 | AD- |
| | | | | | 9599 |
| 2904-2922 | uucuGGAuGGcAucuAGccTsT | 981 | GGCuAGAUGCcAUCcAGAATsT | 982 | AD- |
| | | | | | 9725 |
| 2905-2923 | UCUGGAUGGCAUCUAGCCATsT | 983 | UGGCUAGAUGCCAUCCAGATsT | 984 | AD- |
| | | | | | 9621 |
| 2905-2923 | ucuGGAuGGcAucuAGccATsT | 985 | UGGCuAGAUGCcAUCcAGATsT | 986 | AD- |
| | | | | | 9747 |
| 2925-2943 | AGGCUGGAGACAGGUGCGCTT | 987 | GCGCACCUGUCUCCAGCCUTT | 988 | AD- |
| | | | | | 15405 |
| 2926-2944 | GGCUGGAGACAGGUGCGCCTT | 989 | GGCGCACCUGUCUCCAGCCTT | 990 | AD- |
| | | | | | 15353 |
| 2927-2945 | GCUGGAGACAGGUGCGCCCTT | 991 | GGGCGCACCUGUCUCCAGCTT | 992 | AD- |
| | | | | | 15354 |
| 2972-2990 | UUCCUGAGCCACCUUUACUTT | 993 | AGUAAAGGUGGCUCAGGAATT | 994 | AD- |
| | | | | | 15406 |
| 2973-2991 | UCCUGAGCCACCUUUACUCTT | 995 | GAGUAAAGGUGGCUCAGGATT | 996 | AD- |
| | | | | | 15407 |
| 2974-2992 | CCUGAGCCACCUUUACUCUTT | 997 | AGAGUAAAGGUGGCUCAGGTT | 998 | AD- |
| | | | | | 15355 |
| 2976-2994 | UGAGCCACCUUUACUCUGCTT | 999 | GCAGAGUAAAGGUGGCUCATT | 1000 | AD- |
| | | | | | 15356 |
| 2978-2996 | AGCCACCUUUACUCUGCUCTT | 1001 | GAGCAGAGUAAAGGUGGCUTT | 1002 | AD- |
| | | | | | 15357 |
| 2981-2999 | CACCUUUACUCUGCUCUAUTT | 1003 | AUAGAGCAGAGUAAAGGUGTT | 1004 | AD- |
| | | | | | 15269 |
| 2987-3005 | UACUCUGCUCUAUGCCAGGTsT | 1005 | CCUGGCAUAGAGCAGAGUATsT | 1006 | AD- |
| | | | | | 9565 |
| 2987-3005 | uAcucuGcucuAuGccAGGTsT | 1007 | CCUGGcAuAGAGcAGAGuATsT | 1008 | AD- |
| | | | | | 9691 |
| 2998-3016 | AUGCCAGGCUGUGCUAGCATT | 1009 | UGCUAGCACAGCCUGGCAUTT | 1010 | AD- |
| | | | | | 15358 |
| 3003-3021 | AGGCUGUGCUAGCAACACCTT | 1011 | GGUGUUGCUAGCACAGCCUTT | 1012 | AD- |
| | | | | | 15359 |
| 3006-3024 | CUGUGCUAGCAACACCCAATT | 1013 | UUGGGUGUUGCUAGCACAGTT | 1014 | AD- |
| | | | | | 15360 |
| 3010-3028 | GCUAGCAACACCCAAAGGUTT | 1015 | ACCUUUGGGUGUUGCUAGCTT | 1016 | AD- |
| | | | | | 15219 |
| 3038-3056 | GGAGCCAUCACCUAGGACUTT | 1017 | AGUCCUAGGUGAUGGCUCCTT | 1018 | AD- |
| | | | | | 15361 |
| 3046-3064 | CACCUAGGACUGACUCGGCTT | 1019 | GCCGAGUCAGUCCUAGGUGTT | 1020 | AD- |
| | | | | | 15273 |
| 3051-3069 | AGGACUGACUCGGCAGUGUTT | 1021 | ACACUGCCGAGUCAGUCCUTT | 1022 | AD- |
| | | | | | 15362 |
| 3052-3070 | GGACUGACUCGGCAGUGUGTT | 1023 | CACACUGCCGAGUCAGUCCTT | 1024 | AD- |
| | | | | | 15192 |
| 3074-3092 | UGGUGCAUGCACUGUCUCATT | 1025 | UGAGACAGUGCAUGCACCATT | 1026 | AD- |
| | | | | | 15256 |
| 3080-3098 | AUGCACUGUCUCAGCCAACTT | 1027 | GUUGGCUGAGACAGUGCAUTT | 1028 | AD- |
| | | | | | 15363 |
| 3085-3103 | CUGUCUCAGCCAACCCGCUTT | 1029 | AGCGGGUUGGCUGAGACAGTT | 1030 | AD- |
| | | | | | 15364 |
| 3089-3107 | CUCAGCCAACCCGCUCCACTsT | 1031 | GUGGAGCGGGUUGGCUGAGTsT | 1032 | AD- |
| | | | | | 9604 |
| 3089-3107 | cucAGccAAcccGcuccAcTsT | 1033 | GUGGAGCGGGUUGGCUGAGTsT | 1034 | AD- |
| | | | | | 9730 |
| 3093-3111 | GCCAACCCGCUCCACUACCTsT | 1035 | GGUAGUGGAGCGGGUUGGCTsT | 1036 | AD- |
| | | | | | 9527 |
| 3093-3111 | GccAAcccGcuccAcuAccTsT | 1037 | GGuAGUGGAGCGGGUUGGCTsT | 1038 | AD- |
| | | | | | 9653 |
| 3096-3114 | AACCCGCUCCACUACCCGGTT | 1039 | CCGGGUAGUGGAGCGGGUUTT | 1040 | AD- |
| | | | | | 15365 |
| 3099-3117 | CCGCUCCACUACCCGGCAGTT | 1041 | CUGCCGGGUAGUGGAGCGGTT | 1042 | AD- |
| | | | | | 15294 |
| 3107-3125 | CUACCCGGCAGGGUACACATT | 1043 | UGUGUACCCUGCCGGGUAGTT | 1044 | AD- |
| | | | | | 15173 |
| 3108-3126 | UACCCGGCAGGGUACACAUTT | 1045 | AUGUGUACCCUGCCGGGUATT | 1046 | AD- |
| | | | | | 15366 |
| 3109-3127 | ACCCGGCAGGGUACACAUUTT | 1047 | AAUGUGUACCCUGCCGGGUTT | 1048 | AD- |
| | | | | | 15367 |
| 3110-3128 | CCCGGCAGGGUACACAUUCTT | 1049 | GAAUGUGUACCCUGCCGGGTT | 1050 | AD- |
| | | | | | 15257 |
| 3112-3130 | CGGCAGGGUACACAUUCGCTT | 1051 | GCGAAUGUGUACCCUGCCGTT | 1052 | AD- |
| | | | | | 15184 |
| 3114-3132 | GCAGGGUACACAUUCGCACTT | 1053 | GUGCGAAUGUGUACCCUGCTT | 1054 | AD- |
| | | | | | 15185 |
| 3115-3133 | CAGGGUACACAUUCGCACCTT | 1055 | GGUGCGAAUGUGUACCCUGTT | 1056 | AD- |
| | | | | | 15258 |
| 3116-3134 | AGGGUACACAUUCGCACCCTT | 1057 | GGGUGCGAAUGUGUACCCUTT | 1058 | AD- |
| | | | | | 15186 |
| 3196-3214 | GGAACUGAGCCAGAAACGCTT | 1059 | GCGUUUCUGGCUCAGUUCCTT | 1060 | AD- |
| | | | | | 15274 |
| 3197-3215 | GAACUGAGCCAGAAACGCATT | 1061 | UGCGUUUCUGGCUCAGUUCTT | 1062 | AD- |
| | | | | | 15368 |
| 3198-3216 | AACUGAGCCAGAAACGCAGTT | 1063 | CUGCGUUUCUGGCUCAGUUTT | 1064 | AD- |
| | | | | | 15369 |
| 3201-3219 | UGAGCCAGAAACGCAGAUUTT | 1065 | AAUCUGCGUUUCUGGCUCATT | 1066 | AD- |
| | | | | | 15370 |
| 3207-3225 | AGAAACGCAGAUUGGGCUGTT | 1067 | CAGCCCAAUCUGCGUUUCUTT | 1068 | AD- |
| | | | | | 15259 |
| 3210-3228 | AACGCAGAUUGGGCUGGCUTT | 1069 | AGCCAGCCCAAUCUGCGUUTT | 1070 | AD- |
| | | | | | 15408 |
| 3233-3251 | AGCCAAGCCUCUUCUUACUTsT | 1071 | AGUAAGAAGAGGCUUGGCUTsT | 1072 | AD- |
| | | | | | 9597 |
| 3233-3251 | AGccAAGccucuucuuAcuTsT | 1073 | AGuAAGAAGAGGCUUGGCUTsT | 1074 | AD- |
| | | | | | 9723 |
| 3233-3251 | AfgCfcAfaGfcCfuCfuUfcUfuAfcU | 1075 | p- | 1076 | AD- |
| | fTsT | | aGfuAfaGfaAfgAfgGfcUfuGfgCfuTsT | | 14680 |
| 3233-3251 | AGCfCfAAGCfCfUfCfUfUfCfUfUfA | 1077 | AGUfAAGAAGAGGCfUfUfGGCfUfTsT | 1078 | AD- |
| | CfUfTsT | | | | 14690 |
| 3233-3251 | AgCcAaGcCuCuUcUuAcUTsT | 1079 | p- | 1080 | AD- |
| | | | aGfuAfaGfaAfgAfgGfcUfuGfgCfuTsT | | 14700 |
| 3233-3251 | AgCcAaGcCuCuUcUuAcUTsT | 1081 | AGUfAAGAAGAGGCfUfUfGGCfUfTsT | 1082 | AD- |
| | | | | | 14710 |
| 3233-3251 | AfgCfcAfaGfcCfuCfuUfcUfuAfcU | 1083 | AGUAAgaAGagGCUUGgcuTsT | 1084 | AD- |
| | fTsT | | | | 14720 |
| 3233-3251 | AGCfCfAAGCfCfUfCfUfUfCfUfUfA | 1085 | AGUAAgaAGagGCUUGgcuTsT | 1086 | AD- |
| | CfUfTsT | | | | 14730 |
| 3233-3251 | AgCcAaGcCuCuUcUuAcUTsT | 1087 | AGUAAgaAGagGCUUGgcuTsT | 1088 | AD- |
| | | | | | 14740 |
| 3233-3251 | UfgGfuUfcCfcUfgAfgGfaCfcAfgC | 1089 | p- | 1090 | AD- |
| | fTsT | | gCfuGfgUfcCfuCfaGfgGfaAfcCfaTsT | | 15086 |
| 3233-3251 | UfGGUfUfCfCfCfUfGAGGACfCfAGC | 1091 | GCfUfGGUfCfCfUfCfAGGGAACfCfATsT | 1092 | AD- |
| | fTsT | | | | 15096 |
| 3233-3251 | UgGuUcCcUgAgGaCcAgCTsT | 1093 | p- | 1094 | AD- |
| | | | gCfuGfgUfcCfuCfaGfgGfaAfcCfaTsT | | 15106 |
| 3233-3251 | UgGuUcCcUgAgGaCcAgCTsT | 1095 | GCfUfGGUfCfCfUfCfAGGGAACfCfATsT | 1096 | AD- |
| | | | | | 15116 |
| 32333251- | UfgGfuUfcCfcUfgAfgGfaCfcAfgC | 1097 | GCUGGucCUcaGGGAAccaTsT | 1098 | AD- |
| | fTsT | | | | 15126 |
| 3233-3251 | UfGGUfUfCfCfCfUfGAGGACfCfAGC | 1099 | GCUGGucCUcaGGGAAccaTsT | 1100 | AD- |
| | fTsT | | | | 15136 |
| 3233-3251 | UgGuUcCcUgAgGaCcAgCTsT | 1101 | GCUGGucCUcaGGGAAccaTsT | 1102 | AD- |
| | | | | | 15146 |
| 3242-3260 | UCUUCUUACUUCACCCGGCTT | 1103 | GCCGGGUGAAGUAAGAAGATT | 1104 | AD- |
| | | | | | 15260 |
| 3243-3261 | CUUCUUACUUCACCCGGCUTT | 1105 | AGCCGGGUGAAGUAAGAAGTT | 1106 | AD- |
| | | | | | 15371 |
| 3244-3262 | UUCUUACUUCACCCGGCUGTT | 1107 | CAGCCGGGUGAAGUAAGAATT | 1108 | AD- |
| | | | | | 15372 |
| 3262-3280 | GGGCUCCUCAUUUUUACGGTT | 1109 | CCGUAAAAAUGAGGAGCCCTT | 1110 | AD- |
| | | | | | 15172 |
| 3263-3281 | GGCUCCUCAUUUUUACGGGTT | 1111 | CCCGUAAAAAUGAGGAGCCTT | 1112 | AD- |
| | | | | | 15295 |
| 3264-3282 | GCUCCUCAUUUUUACGGGUTT | 1113 | ACCCGUAAAAAUGAGGAGCTT | 1114 | AD- |
| | | | | | 15373 |
| 3265-3283 | CUCCUCAUUUUUACGGGUATT | 1115 | UACCCGUAAAAAUGAGGAGTT | 1116 | AD- |
| | | | | | 15163 |
| 3266-3284 | UCCUCAUUUUUACGGGUAATT | 1117 | UUACCCGUAAAAAUGAGGATT | 1118 | AD- |
| | | | | | 15165 |
| 3267-3285 | CCUCAUUUUUACGGGUAACTT | 1119 | GUUACCCGUAAAAAUGAGGTT | 1120 | AD- |
| | | | | | 15374 |
| 3268-3286 | CUCAUUUUUACGGGUAACATT | 1121 | UGUUACCCGUAAAAAUGAGTT | 1122 | AD- |
| | | | | | 15296 |
| 3270-3288 | CAUUUUUACGGGUAACAGUTT | 1123 | ACUGUUACCCGUAAAAAUGTT | 1124 | AD- |
| | | | | | 15261 |
| 3271-3289 | AUUUUUACGGGUAACAGUGTT | 1125 | CACUGUUACCCGUAAAAAUTT | 1126 | AD- |
| | | | | | 15375 |
| 3274-3292 | UUUACGGGUAACAGUGAGGTT | 1127 | CCUCACUGUUACCCGUAAATT | 1128 | AD- |
| | | | | | 15262 |
| 3308-3326 | CAGACCAGGAAGCUCGGUGTT | 1129 | CACCGAGCUUCCUGGUCUGTT | 1130 | AD- |
| | | | | | 15376 |
| 3310-3328 | GACCAGGAAGCUCGGUGAGTT | 1131 | CUCACCGAGCUUCCUGGUCTT | 1132 | AD- |
| | | | | | 15377 |
| 3312-3330 | CCAGGAAGCUCGGUGAGUGTT | 1133 | CACUCACCGAGCUUCCUGGTT | 1134 | AD- |
| | | | | | 15409 |
| 3315-3333 | GGAAGCUCGGUGAGUGAUGTT | 1135 | CAUCACUCACCGAGCUUCCTT | 1136 | AD- |
| | | | | | 15378 |
| 3324-3342 | GUGAGUGAUGGCAGAACGATT | 1137 | UCGUUCUGCCAUCACUCACTT | 1138 | AD- |
| | | | | | 15410 |
| 3326-3344 | GAGUGAUGGCAGAACGAUGTT | 1139 | CAUCGUUCUGCCAUCACUCTT | 1140 | AD- |
| | | | | | 15379 |
| 3330-3348 | GAUGGCAGAACGAUGCCUGTT | 1141 | CAGGCAUCGUUCUGCCAUCTT | 1142 | AD- |
| | | | | | 15187 |
| 3336-3354 | AGAACGAUGCCUGCAGGCATT | 1143 | UGCCUGCAGGCAUCGUUCUTT | 1144 | AD- |
| | | | | | 15263 |
| 3339-3357 | ACGAUGCCUGCAGGCAUGGTT | 1145 | CCAUGCCUGCAGGCAUCGUTT | 1146 | AD- |
| | | | | | 15264 |
| 3348-3366 | GCAGGCAUGGAACUUUUUCTT | 1147 | GAAAAAGUUCCAUGCCUGCTT | 1148 | AD- |
| | | | | | 15297 |
| 3356-3374 | GGAACUUUUUCCGUUAUCATT | 1149 | UGAUAACGGAAAAAGUUCCTT | 1150 | AD- |
| | | | | | 15208 |
| 3357-3375 | GAACUUUUUCCGUUAUCACTT | 1151 | GUGAUAACGGAAAAAGUUCTT | 1152 | AD- |
| | | | | | 15209 |
| 3358-3376 | AACUUUUUCCGUUAUCACCTT | 1153 | GGUGAUAACGGAAAAAGUUTT | 1154 | AD- |
| | | | | | 15193 |
| 3370-3388 | UAUCACCCAGGCCUGAUUCTT | 1155 | GAAUCAGGCCUGGGUGAUATT | 1156 | AD- |
| | | | | | 15380 |
| 3378-3396 | AGGCCUGAUUCACUGGCCUTT | 1157 | AGGCCAGUGAAUCAGGCCUTT | 1158 | AD- |
| | | | | | 15298 |
| 3383-3401 | UGAUUCACUGGCCUGGCGGTT | 1159 | CCGCCAGGCCAGUGAAUCATT | 1160 | AD- |
| | | | | | 15299 |
| 3385-3403 | AUUCACUGGCCUGGCGGAGTT | 1161 | CUCCGCCAGGCCAGUGAAUTT | 1162 | AD- |
| | | | | | 15265 |
| 3406-3424 | GCUUCUAAGGCAUGGUCGGTT | 1163 | CCGACCAUGCCUUAGAAGCTT | 1164 | AD- |
| | | | | | 15381 |
| 3407-3425 | CUUCUAAGGCAUGGUCGGGTT | 1165 | CCCGACCAUGCCUUAGAAGTT | 1166 | AD- |
| | | | | | 15210 |
| 3429-3447 | GAGGGCCAACAACUGUCCCTT | 1167 | GGGACAGUUGUUGGCCCUCTT | 1168 | AD- |
| | | | | | 15270 |
| 3440-3458 | ACUGUCCCUCCUUGAGCACTsT | 1169 | GUGCUCAAGGAGGGACAGUTsT | 1170 | AD- |
| | | | | | 9591 |
| 3440-3458 | AcuGucccuccuuGAGcAcTsT | 1171 | GUGCUcAAGGAGGGAcAGUTsT | 1172 | AD- |
| | | | | | 9717 |
| 3441-3459 | CUGUCCCUCCUUGAGCACCTsT | 1173 | GGUGCUCAAGGAGGGACAGTsT | 1174 | AD- |
| | | | | | 9622 |
| 3441-3459 | cuGucccuccuuGAGcAccTsT | 1175 | GGUGCUcAAGGAGGGAcAGTsT | 1176 | AD- |
| | | | | | 9748 |
| 3480-3498 | ACAUUUAUCUUUUGGGUCUTsT | 1177 | AGACCCAAAAGAUAAAUGUTsT | 1178 | AD- |
| | | | | | 9587 |
| 3480-3498 | AcAuudAucuuuuGGGucuTsT | 1179 | AGACCcAAAAGAuAAAUGUTsT | 1180 | AD- |
| | | | | | 9713 |
| 3480-3498 | AfcAfuUfuAfuCfuUfuUfgGfgUfCU | 1181 | p- | 1182 | AD- |
| | fTsT | | aGfaCfcCfaAfaAfgAfuAfaAfuGfuTsT | | 14679 |
| 3480-3498 | ACfAUfUfUfAUfCfUfUfUfUfGGGUf | 1183 | AGACfCfCfAAAAGAUfAAAUfGUfTsT | 1184 | AD- |
| | CfUfTsT | | | | 14689 |
| 3480-3498 | AcAuUuAuCuUuUgGgUcUTsT | 1185 | P- | 1186 | AD- |
| | | | aGfaCfcCfaAfaAfgAfuAfaAfuGfuTsT | | 14699 |
| 3480-3498 | AcAuUuAuCuUuUgGgUcUTsT | 1187 | AGACfCfCfAAAAGAUfAAAUfGUfTsT | 1188 | AD- |
| | | | | | 14709 |
| 3480-3498 | AfcAfuUfuAfuCfuUfuUfgGfgUfCU | 1189 | AGACCcaAAagAUAAAuguTsT | 1190 | AD- |
| | fTsT | | | | 14719 |
| 3480-3498 | ACfAUfUfUfAUfCfUfUfUfUfGGGUf | 1191 | AGACCcaAAagAUAAAuguTsT | 1192 | AD- |
| | CfUfTsT | | | | 14729 |
| 3480-3498 | AcAuUuAuCuUuUgGgUcUTsT | 1193 | AGACCcaAAagAUAAAuguTsT | 1194 | AD- |
| | | | | | 14739 |
| 3480-3498 | GfcCfaUfcUfgCfuGfcCfgGfaGfcC | 1195 | p- | 1196 | AD- |
| | fTsT | | gGfcUfcCfgGfcAfgCfaGfaUfgGfcTsT | | 15085 |
| 3480-3498 | GCfCfAUfCfUfGCfUfGCfCfGGAGCf | 1197 | GGCfUfCfCfGGCfAGCfAGAUfGGCfTsT | 1198 | AD- |
| | CfTsT | | | | 15095 |
| 3480-3498 | GcCaUcUgCuGcCgGaGcCTsT | 1199 | P- | 1200 | AD- |
| | | | gGfcUfcCfgGfcAfgCfaGfaUfgGfcTsT | | 15105 |
| 3480-3498 | GcCaUcUgCuGcCgGaGcCTsT | 1201 | GGCfUfCfCfGGCfAGCfAGAUfGGCfTsT | 1202 | AD- |
| | | | | | 15115 |
| 3480-3498 | GfcCfaUfcUfgCfuGfcCfgGfaGfcC | 1203 | GGCUCauGCagCAGUggcTsT | 1204 | AD- |
| | fTsT | | | | 15125 |
| 3480-3498 | GCfCfAUfCfUfGCfUfGCfCfGGAGCf | 1205 | GGCUCauGCagCAGAUggcTsT | 1206 | AD- |
| | CfTsT | | | | 15135 |
| 3480-3498 | GcCaUcUgCuGcCgGaGcCTsT | 1207 | GGCUCauGCagCAGAUggcTsT | 1208 | AD- |
| | | | | | 15145 |
| 3481-3499 | CAUUUAUCUUUUGGGUCUGTsT | 1209 | CAGACCCAAAAGAUAAAUGTsT | 1210 | AD- |
| | | | | | 9578 |
| 3481-3499 | cAuuuAucuuuuGGGucuGTsT | 1211 | cAGACCcAAAAGAuAAAUGTsT | 1212 | AD- |
| | | | | | 9704 |
| 3485-3503 | UAUCUUUUGGGUCUGUCCUTsT | 1213 | AGGACAGACCCAAAAGAUATsT | 1214 | AD- |
| | | | | | 9558 |
| 3485-3503 | uAucuuuuGGGucuGuccuTsT | 1215 | AGGAcAGACCcAAAAGAuATsT | 1216 | AD- |
| | | | | | 9684 |
| 3504-3522 | CUCUGUUGCCUUUUUACAGTsT | 1217 | CUGUAAAAAGGCAACAGAGTsT | 1218 | AD- |
| | | | | | 9634 |
| 3504-3522 | cucuGuuGccuuuuuAcAGTsT | 1219 | CUGuAAAAAGGcAAcAGAGTsT | 1220 | AD- |
| | | | | | 9760 |
| 3512-3530 | CCUUUUUACAGCCAACUUUTT | 1221 | AAAGUUGGCUGUAAAAAGGTT | 1222 | AD- |
| | | | | | 15411 |
| 3521-3539 | AGCCAACUUUUCUAGACCUTT | 1223 | AGGUCUAGAAAAGUUGGCUTT | 1224 | AD- |
| | | | | | 15266 |
| 3526-3544 | ACUUUUCUAGACCUGUUUUTT | 1225 | AAAACAGGUCUAGAAAAGUTT | 1226 | AD- |
| | | | | | 15382 |
| 3530-3548 | UUCUAGACUGUUUUGCUUTsT | 1227 | AAGCAAAACAGGUCUAGAATsT | 1228 | AD- |
| | | | | | 9554 |
| 3530-3548 | uucuAGAccuGuuuuGcuuTsT | 1229 | AAGcAAAAcAGGUCuAGAATsT | 1230 | AD- |
| | | | | | 9680 |
| 3530-3548 | UfuCfuAfgAfcCfuGfuUfuUfgCfuU | 1231 | p- | 1232 | AD- |
| | fTsT | | aAfgCfaAfaAfcAfgGfuCfuAfgAfaTsT | | 14676 |
| 3530-3548 | UfUfCfUfAGACfCfUfGUfUfUfUfGC | 1233 | AAGCfAAAACfAGGUfCfUfAGAATsT | 1234 | AD- |
| | fUfUfTsT | | | | 14686 |
| 3530-3548 | UuCuAgAcCuGuUuUgCuUTsT | 1235 | p- | 1236 | AD- |
| | | | aAfgCfaAfaAfcAfgGfuCfuAfgAfaTsT | | 14696 |
| 3530-3548 | UuCuAgAcCuGuUuUgCuUTsT | 1237 | AAGCfAAAACfAGGUfCfUfAGAATsT | 1238 | AD- |
| | | | | | 14706 |
| 3530-3548 | UfuCfuAfgAfcCfuGfuUfuUffCfuU | 1239 | AAGcAaaACagGUCUAgaaTsT | 1240 | AD- |
| | fTsT | | | | 14716 |
| 3530-3548 | UfUfCfUfAGACfCfUfGUfUfUfUfGC | 1241 | AAGcAaaACagGUCUAgaaTsT | 1242 | AD- |
| | fUfUfTsT | | | | 14726 |
| 3530-3548 | UuCuAgAcCuGuUuUgCuUTsT | 1243 | AAGcAaaACagGUCUAgaaTsT | 1244 | AD- |
| | | | | | 14736 |
| 3530-3548 | CfaUfaGfgCfcUfgGfaGfuUfuAfuU | 1245 | p- | 1246 | AD- |
| | fTsT | | aAfuAfaAfcUfcCfaGfgCfcUfaUfgTsT | | 15082 |
| 3530-3548 | CfAUfAGGCfCfUfGGAGUfUfUfAUfU | 1247 | AAUfAAACfUfCfCfAGGCfCfUfAUfGTsT | 1248 | AD- |
| | fTsT | | | | 15092 |
| 3530-3548 | CaUaGgCcUgGaGuUuAuUTsT | 1249 | P- | 1250 | AD- |
| | | | aAfuAfaAfcUfcCfaGfgCfcUfaUfgTsT | | 15102 |
| 3530-3548 | CaUaGgCcUgGaGuUuAuUTsT | 1251 | AAUfAAACfUfCfCfAGGCfCfUfAUfGTsT | 1252 | AD- |
| | | | | | 15112 |
| 3530-3548 | CfaUfaGfgCfcUfgGfaGfuUfuAfuU | 1253 | AAUAAacUCcaGGCCUaugTsT | 1254 | AD- |
| | fTsT | | | | 15122 |
| 3530-3548 | CfAUfAGGCfCfUfGGAGUfUfUfAUfU | 1255 | AAUAAacUCcaGGCCUaugTsT | 1256 | AD- |
| | fTsT | | | | 15132 |
| 3530-3548 | CaUaGgCcUgGaGuUuAuUTsT | 1257 | AAUAAacUCcaGGCCUaugTsT | 1258 | AD- |
| | | | | | 15142 |
| 3531-3549 | UCUAGACCUGUUUUGCUUUTsT | 1259 | AAAGCAAAACAGGUCUAGATsT | 1260 | AD- |
| | | | | | 9553 |
| 3531-3549 | ucuAGAccuGuuuuGcuuuTsT | 1261 | AAAGcAAAAcAGGUCuAGATsT | 1262 | AD- |
| | | | | | 9679 |
| 3531-3549 | UfcUfaGfaCfcUfgUfuUfuGfcUfuU | 1263 | p- | 1264 | AD- |
| | fTsT | | aAfaGfcAfaAfaCfaGfgUfcUfaGfaTsT | | 14675 |
| 3531-3549 | UfCfUfAGACfCfUfGUfUfUfUfGCfU | 1265 | AAAGCfAAAACfAGGUfCfUfAGATsT | 1266 | AD- |
| | fUfUfTsT | | | | 14685 |
| 3531-3549 | UcUaGaCcUgUuUuGcUuUTsT | 1267 | P- | 1268 | AD- |
| | | | aAfaGfcAfaAfaCfaGfgUfcUfaGfaTsT | | 14695 |
| 3531-3549 | UcUaGaCcUgUuUuGcUuUTsT | 1269 | AAAGCfAAAACfAGGUfCfUfAGATsT | 1270 | AD- |
| | | | | | 14705 |
| 3531-3549 | UfcUfaGfaCfcUfgUfuUfuGfcUfuU | 1271 | AAAGCaaAAcaGGUCUagaTsT | 1272 | AD- |
| | fTsT | | | | 14715 |
| 3531-3549 | UfCfUfAGACfCfUfGUfUfUfUfGCfU | 1273 | AAAGCaaAAcaGGUCUagaTsT | 1274 | AD- |
| | fUfUfTsT | | | | 14725 |
| 3531-3549 | UcUaGaCcUgUuUuGcUuUTsT | 1275 | AAAGCaaAAcaGGUCUagaTsT | 1276 | AD- |
| | | | | | 14735 |
| 3531-3549 | UfcAfuAfgGfcCfuGfgAfgUfuUfaU | 1277 | p- | 1279 | AD- |
| | fTsT | | aUfaAfaCfuCfcAfgGfcCfuAfuGfaTsT | | 15081 |
| 3531-3549 | UfCfAUfAGGCfCfUfGGAGUfUfUfAU | 1279 | AUfAAACfUfCfCfAGGCfCfUfAUfGATsT | 1280 | AD- |
| | fTsT | | | | 15091 |
| 3531-3549 | UcAuAgGcCuGgAgUuUaUTsT | 1281 | P- | 1282 | AD- |
| | | | aUfaAfaCfuCfcAfgGfcCfuAfuGfaTsT | | 15101 |
| 3531-3549 | UcAuAgGcCuGgAgUuUaUTsT | 1283 | AUfAAACfUfCfCfAGGCfCfUfAUfGATsT | 1284 | AD- |
| | | | | | 15111 |
| 3531-3549 | UfcAfuAfgGfcCfuGfgAfgUfuUfaU | 1285 | AUAAAcuCCagGCCUAugaTsT | 1287 | AD- |
| | fTsT | | | | 15121 |
| 3531-3549 | UfCfAUfAGGCfCfUfGGAGUfUfUfAU | 1287 | AUAAAcuCCagGCCUAugaTsT | 1288 | AD- |
| | fTsT | | | | 15131 |
| 3531-3549 | UcAuAgGcCuGgAgUuUaUTsT | 1289 | AUAAAcuCCagGCCUAugaTsT | 1290 | AD- |
| | | | | | 15141 |
| 3557-3575 | UGAAGAUAUUUAUUCUGGGTsT | 1291 | CCCAGAAUAAAUAUCUUCATsT | 1292 | AD- |
| | | | | | 9626 |
| 3557-3575 | uGAAGAuAuuuAuucuGGGTsT | 1293 | CCcAGAAuAAAuAUCUUcATsT | 1294 | AD- |
| | | | | | 9752 |
| 3570-3588 | CUGGGUUUUGUAGCAUUUTsT | 1295 | AAAUGCUACAAAACCCAGATsT | 1296 | AD- |
| | | | | | 9629 |
| 3570-3588 | ucuGGGuuuuGuAGcAuuuTsT | 1297 | AAAUGCuAcAAAACCcAGATsT | 1298 | AD- |
| | | | | | 9755 |
| 3613-3631 | AUAAAAACAAACAAACGUUTT | 1299 | AACGUUUGUUUGUUUUUAUTT | 1300 | AD- |
| | | | | | 15412 |
| 3617-3635 | AAACAAACAAACGUUGUCCTT | 1301 | GGACAACGUUUGUUUGUUUTT | 1302 | AD- |
| | | | | | 15211 |
| 3618-3636 | AACAAACAAACGUUGUCCUTT | 1303 | AGGACAACGUUUGUUUGUUTT | 1304 | AD- |
| | | | | | 15300 |

U, C, A, G: corresponding ribonucleotide; T: deoxythymidine; u, c, a, g: corresponding 2′O-methyl ribonucleotide; Uf, Cf, Af, Gf: corresponding 2′-deoxy-2′-fluoro ribonucleotide; where nucleotides are written in sequence, they are connected by 3′-5′ phosphodiester groups; nucleotides with interjected ″s″ are connected by 3′-O-5′-O phosphorothiodiester groups; unless denoted by prefix ″p-″, oligonucleotides are devoid of a 5′-phosphate group on the 5′-most nucleotide; all oligonucleotides bear 3′-OH on the 3′-most nucleotide

TABLE 1b
Screening of siRNAs targeted to PCSK9

| | Mean percent remaining mRNA transcript at siRNA | | | | | |
|---|---|---|---|---|---|---|
| | concentration/in cell type | | | | IC50 in | IC50 in Cynomolgous |
| Duplex | 100 nM/ | 30 nM/ | 3 nM/ | 30 nM/ | HepG2 | monkey Hepatocyte |
| name | HepG2 | HepG2 | HepG2 | HeLa | [nM] | [nM]s |
| AD-15220 | | | | 35 | | |
| AD-15275 | | | | 56 | | |
| AD-15301 | | | | 70 | | |
| AD-15276 | | | | 42 | | |
| AD-15302 | | | | 32 | | |
| AD-15303 | | | | 37 | | |
| AD-15221 | | | | 30 | | |
| AD-15413 | | | | 61 | | |
| AD-15304 | | | | 70 | | |
| AD-15305 | | | | 36 | | |
| AD-15306 | | | | 20 | | |
| AD-15307 | | | | 38 | | |
| AD-15277 | | | | 50 | | |
| AD-9526 | 74 | 89 | | | | |
| AD-9652 | | 97 | | | | |
| AD-9519 | | 78 | | | | |
| AD-9645 | | 66 | | | | |
| AD-9523 | | 55 | | | | |
| AD-9649 | | 60 | | | | |
| AD-9569 | | 112 | | | | |
| AD-9695 | | 102 | | | | |
| AD-15222 | | | | 75 | | |
| AD-15278 | | | | 78 | | |
| AD-15178 | | | | 83 | | |
| AD-15308 | | | | 84 | | |
| AD-15223 | | | | 67 | | |
| AD-15309 | | | | 34 | | |
| AD-15279 | | | | 44 | | |
| AD-15194 | | | | 63 | | |
| AD-15310 | | | | 42 | | |
| AD-15311 | | | | 30 | | |
| AD-15392 | | | | 18 | | |
| AD-15312 | | | | 21 | | |
| AD-15313 | | | | 19 | | |
| AD-15280 | | | | 81 | | |
| AD-15267 | | | | 82 | | |
| AD-15314 | | | | 32 | | |
| AD-15315 | | | | 74 | | |
| AD-9624 | | 94 | | | | |
| AD-9750 | | 96 | | | | |
| AD-9623 | 43 | 66 | | | | |
| AD-9749 | | 105 | | | | |
| AD-15384 | | | | 48 | | |
| AD-9607 | | 32 | 28 | | 0.20 | |
| AD-9733 | | 78 | 73 | | | |
| AD-9524 | | 23 | 28 | | 0.07 | |
| AD-9650 | | 91 | 90 | | | |
| AD-9520 | | 23 | 32 | | | |
| AD-9520 | | 23 | | | | |
| AD-9646 | | 97 | 108 | | | |
| AD-9608 | | 37 | | | | |
| AD-9734 | | 91 | | | | |
| AD-9546 | | 32 | | | | |
| AD-9672 | | 57 | | | | |
| AD-15385 | | | | 54 | | |
| AD-15393 | | | | 31 | | |
| AD-15316 | | | | 37 | | |
| AD-15317 | | | | 37 | | |
| AD-15318 | | | | 63 | | |
| AD-15195 | | | | 45 | | |
| AD-15224 | | | | 57 | | |
| AD-15188 | | | | 42 | | |
| AD-15225 | | | | 51 | | |
| AD-15281 | | | | 89 | | |
| AD-15282 | | | | 75 | | |
| AD-15319 | | | | 61 | | |
| AD-15226 | | | | 56 | | |
| AD-15271 | | | | 25 | | |
| AD-15283 | | | | 25 | | |
| AD-15284 | | | | 64 | | |
| AD-15189 | | | | 17 | | |
| AD-15227 | | | | 62 | | |
| AD-9547 | | 31 | 29 | | 0.20 | |
| AD-9673 | | 56 | 57 | | | |
| AD-9548 | | 54 | 60 | | | |
| AD-9674 | | 36 | 57 | | | |
| AD-9529 | | 60 | | | | |
| AD-9655 | | 140 | | | | |
| AD-9605 | | 27 | 31 | | 0.27 | |
| AD-9731 | | 31 | 31 | | 0.32 | |
| AD-9596 | | 37 | | | | |
| AD-9722 | | 76 | | | | |
| AD-9583 | | 42 | | | | |
| AD-9709 | | 104 | | | | |
| AD-9579 | | 113 | | | | |
| AD-9705 | | 81 | | | | |
| AD-15394 | | | | 32 | | |
| AD-15196 | | | | 72 | | |
| AD-15197 | | | | 85 | | |
| AD-15198 | | | | 71 | | |
| AD-9609 | 66 | 71 | | | | |
| AD-9735 | | 115 | | | | |
| AD-9537 | | 145 | | | | |
| AD-9663 | | 102 | | | | |
| AD-9528 | | 113 | | | | |
| AD-9654 | | 107 | | | | |
| AD-9515 | | 49 | | | | |
| AD-9641 | | 92 | | | | |
| AD-9514 | | 57 | | | | |
| AD-9640 | | 89 | | | | |
| AD-9530 | | 75 | | | | |
| AD-9656 | | 77 | | | | |
| AD-9538 | 79 | 80 | | | | |
| AD-9664 | | 53 | | | | |
| AD-9598 | 69 | 83 | | | | |
| AD-9724 | | 127 | | | | |
| AD-9625 | 58 | 88 | | | | |
| AD-9751 | | 60 | | | | |
| AD-9556 | | 46 | | | | |
| AD-9682 | | 38 | | | | |
| AD-9539 | 56 | 63 | | | | |
| AD-9665 | | 83 | | | | |
| AD-9517 | | 36 | | | | |
| AD-9643 | | 40 | | | | |
| AD-9610 | | 36 | 34 | | 0.04 | |
| AD-9736 | | 22 | 29 | | 0.04 | 0.5 |
| AD-14681 | | | | 33 | | |
| AD-14691 | | | | 27 | | |
| AD-14701 | | | | 32 | | |
| AD-14711 | | | | 33 | | |
| AD-14721 | | | | 22 | | |
| AD-14731 | | | | 21 | | |
| AD-14741 | | | | 22 | | |
| AD-15087 | | | | 37 | | |
| AD-15097 | | | | 51 | | |
| AD-15107 | | | | 26 | | |
| AD-15117 | | | | 28 | | |
| AD-15127 | | | | 33 | | |
| AD-15137 | | | | 54 | | |
| AD-15147 | | | | 52 | | |
| AD-9516 | | 94 | | | | |
| AD-9642 | | 105 | | | | |
| AD-9562 | | 46 | 51 | | | |
| AD-9688 | | 26 | 34 | | 4.20 | |
| AD-14677 | | | | 38 | | |
| AD-14687 | | | | 52 | | |
| AD-14697 | | | | 35 | | |
| AD-14707 | | | | 58 | | |
| AD-14717 | | | | 42 | | |
| AD-14727 | | | | 50 | | |
| AD-14737 | | | | 32 | | |
| AD-15083 | | | | 16 | | |
| AD-15093 | | | | 24 | | |
| AD-15103 | | | | 11 | | |
| AD-15113 | | | | 34 | | |
| AD-15123 | | | | 19 | | |
| AD-15133 | | | | 15 | | |
| AD-15143 | | | | 16 | | |
| AD-9521 | | 50 | | | | |
| AD-9647 | | 62 | | | | |
| AD-9611 | | 48 | | | | |
| AD-9737 | | 68 | | | | |
| AD-9592 | 46 | 55 | | | | |
| AD-9718 | | 78 | | | | |
| AD-9561 | | 64 | | | | |
| AD-9687 | | 84 | | | | |
| AD-9636 | | 42 | 41 | | 2.10 | |
| AD-9762 | | 9 | 28 | | 0.40 | 0.5 |
| AD-9540 | | 45 | | | | |
| AD-9666 | | 81 | | | | |
| AD-9535 | 48 | 73 | | | | |
| AD-9661 | | 83 | | | | |
| AD-9559 | | 35 | | | | |
| AD-9685 | | 77 | | | | |
| AD-9533 | | 100 | | | | |
| AD-9659 | | 88 | | | | |
| AD-9612 | | 122 | | | | |
| AD-9738 | | 83 | | | | |
| AD-9557 | 75 | 96 | | | | |
| AD-9683 | | 48 | | | | |
| AD-9531 | | 31 | 32 | | 0.53 | |
| AD-9657 | | 23 | 29 | | 0.66 | 0.5 |
| AD-14673 | | | | 81 | | |
| AD-14683 | | | | 56 | | |
| AD-14693 | | | | 56 | | |
| AD-14703 | | | | 68 | | |
| AD-14713 | | | | 55 | | |
| AD-14723 | | | | 24 | | |
| AD-14733 | | | | 34 | | |
| AD-15079 | | | | 85 | | |
| AD-15089 | | | | 54 | | |
| AD-15099 | | | | 70 | | |
| AD-15109 | | | | 67 | | |
| AD-15119 | | | | 67 | | |
| AD-15129 | | | | 57 | | |
| AD-15139 | | | | 69 | | |
| AD-9542 | | 160 | | | | |
| AD-9668 | | 92 | | | | |
| AD-9739 | | 109 | | | | |
| AD-9637 | 56 | 83 | | | | |
| AD-9763 | | 79 | | | | |
| AD-9630 | | 82 | | | | |
| AD-9756 | | 63 | | | | |
| AD-9593 | | 55 | | | | |
| AD-9719 | | 115 | | | | |
| AD-9601 | | 111 | | | | |
| AD-9727 | | 118 | | | | |
| AD-9573 | | 36 | 42 | | 1.60 | |
| AD-9699 | | 32 | 36 | | 2.50 | |
| AD-15228 | | | | 26 | | |
| AD-15395 | | | | 53 | | |
| AD-9602 | | 126 | | | | |
| AD-9728 | | 94 | | | | |
| AD-15386 | | | | 45 | | |
| AD-9580 | | 112 | | | | |
| AD-9706 | | 86 | | | | |
| AD-9581 | | 35 | | | | |
| AD-9707 | | 81 | | | | |
| AD-9543 | | 51 | | | | |
| AD-9669 | | 97 | | | | |
| AD-9574 | | 74 | | | | |
| AD-9700 | | | | | | |
| AD-15320 | | | | 26 | | |
| AD-15321 | | | | 34 | | |
| AD-15199 | | | | 64 | | |
| AD-15167 | | | | 86 | | |
| AD-15164 | | | | 41 | | |
| AD-15166 | | | | 43 | | |
| AD-15322 | | | | 64 | | |
| AD-15200 | | | | 46 | | |
| AD-15213 | | | | 27 | | |
| AD-15229 | | | | 44 | | |
| AD-15215 | | | | 49 | | |
| AD-15214 | | | | 101 | | |
| AD-9315 | | 15 | 32 | | 0.98 | |
| AD-9326 | | 35 | 51 | | | |
| AD-9318 | | 14 | 37 | | 0.40 | |
| AD-9323 | | 14 | 33 | | | |
| AD-9314 | | 11 | 22 | | 0.04 | |
| AD-10792 | | | | | 0.10 | 0.10 |
| AD-10796 | | | | | 0.1 | 0.1 |
| AD-9638 | | 101 | | | | |
| AD-9764 | | 112 | | | | |
| AD-9525 | | 53 | | | | |
| AD-9651 | | 58 | | | | |
| AD-9560 | | 97 | | | | |
| AD-9686 | | 111 | | | | |
| AD-9536 | | 157 | | | | |
| AD-9662 | | 81 | | | | |
| AD-9584 | 52 | 68 | | | | |
| AD-9710 | | 111 | | | | |
| AD-15323 | | | | 62 | | |
| AD-9551 | | 91 | | | | |
| AD-9677 | | 62 | | | | |
| AD-15230 | | | | 52 | | |
| AD-15231 | | | | 25 | | |
| AD-15285 | | | | 36 | | |
| AD-15396 | | | | 27 | | |
| AD-15397 | | | | 56 | | |
| AD-9600 | | 112 | | | | |
| AD-9726 | | 95 | | | | |
| AD-9606 | | 107 | | | | |
| AD-9732 | | 105 | | | | |
| AD-9633 | 56 | 75 | | | | |
| AD-9759 | | 111 | | | | |
| AD-9588 | | 66 | | | | |
| AD-9714 | | 106 | | | | |
| AD-9589 | 67 | 85 | | | | |
| AD-9715 | | 113 | | | | |
| AD-9575 | | 120 | | | | |
| AD-9701 | | 100 | | | | |
| AD-9563 | | 103 | | | | |
| AD-9689 | | 81 | | | | |
| AD-9594 | 80 | 95 | | | | |
| AD-9720 | | 92 | | | | |
| AD-9585 | | 83 | | | | |
| AD-9711 | | 122 | | | | |
| AD-9614 | | 100 | | | | |
| AD-9740 | | 198 | | | | |
| AD-9615 | | 116 | | | | |
| AD-9741 | | 130 | | | | |
| AD-9534 | | 32 | 30 | | | |
| AD-9534 | | 32 | | | | |
| AD-9660 | | 89 | 79 | | | |
| AD-15324 | | | | 46 | | |
| AD-15232 | | | | 19 | | |
| AD-15233 | | | | 25 | | |
| AD-15234 | | | | 59 | | |
| AD-15286 | | | | 109 | | |
| AD-9590 | | 122 | | | | |
| AD-9716 | | 114 | | | | |
| AD-9632 | | 34 | | | | |
| AD-9758 | | 96 | | | | |
| AD-9567 | | 41 | | | | |
| AD-9693 | | 50 | | | | |
| AD-9586 | 81 | 104 | | | | |
| AD-9712 | | 107 | | | | |
| AD-9564 | | 120 | | | | |
| AD-9690 | | 92 | | | | |
| AD-9616 | 74 | 84 | | | | |
| AD-9742 | | 127 | | | | |
| AD-15398 | | | | 24 | | |
| AD-9617 | | 111 | | | | |
| AD-9743 | | 104 | | | | |
| AD-9635 | 73 | 90 | | | | |
| AD-9761 | | 15 | 33 | | | 0.5 |
| AD-9568 | | 76 | | | | |
| AD-9694 | | 52 | | | | |
| AD-9576 | | 47 | | | | |
| AD-9702 | | 79 | | | | |
| AD-9627 | | 69 | | | | |
| AD-9753 | | 127 | | | | |
| AD-9628 | | 141 | | | | |
| AD-9754 | | 89 | | | | |
| AD-9631 | | 80 | | | | |
| AD-9757 | | 78 | | | | |
| AD-9595 | | 31 | 32 | | | |
| AD-9721 | | 87 | 70 | | | |
| AD-9544 | | 68 | | | | |
| AD-9670 | | 67 | | | | |
| AD-15235 | | | | 25 | | |
| AD-15236 | | | | 73 | | |
| AD-15168 | | | | 100 | | |
| AD-15174 | | | | 92 | | |
| AD-15325 | | | | 81 | | |
| AD-15326 | | | | 65 | | |
| AD-9570 | 35 | 42 | | | | |
| AD-9696 | | 77 | | | | |
| AD-9566 | | 38 | | | | |
| AD-9692 | | 78 | | | | |
| AD-9532 | | 100 | | | | |
| AD-9658 | | 102 | | | | |
| AD-9549 | | 50 | | | | |
| AD-9675 | | 78 | | | | |
| AD-9541 | | 43 | | | | |
| AD-9667 | | 73 | | | | |
| AD-9550 | | 36 | | | | |
| AD-9676 | | 100 | | | | |
| AD-9571 | | 27 | 32 | | | |
| AD-9697 | | 74 | 89 | | | |
| AD-9572 | 47 | 53 | | | | |
| AD-9698 | | 73 | | | | |
| AD-15327 | | | | 82 | | |
| AD-9639 | | 30 | 35 | | | |
| AD-9765 | | 82 | 74 | | | |
| AD-9518 | | 31 | 35 | | 0.60 | |
| AD-9518 | | 31 | | | | |
| AD-9644 | | 35 | 37 | | 2.60 | 0.5 |
| AD-14672 | | | | 26 | | |
| AD-14682 | | | | 27 | | |
| AD-14692 | | | | 22 | | |
| AD-14702 | | | | 19 | | |
| AD-14712 | | | | 25 | | |
| AD-14722 | | | | 18 | | |
| AD-14732 | | | | 32 | | |
| AD-15078 | | | | 86 | | |
| AD-15088 | | | | 97 | | |
| AD-15098 | | | | 74 | | |
| AD-15108 | | | | 67 | | |
| AD-15118 | | | | 76 | | |
| AD-15128 | | | | 86 | | |
| AD-15138 | | | | 74 | | |
| AD-15237 | | | | 30 | | |
| AD-15287 | | | | 30 | | |
| AD-15238 | | | | 36 | | |
| AD-15328 | | | | 35 | | |
| AD-15399 | | | | 47 | | |
| AD-9582 | | 37 | | | | |
| AD-9708 | | 81 | | | | |
| AD-9545 | | 31 | 43 | | | |
| AD-9671 | | 15 | 33 | | 2.50 | |
| AD-14674 | | | | 16 | | |
| AD-14684 | | | | 26 | | |
| AD-14694 | | | | 18 | | |
| AD-14704 | | | | 27 | | |
| AD-14714 | | | | 20 | | |
| AD-14724 | | | | 18 | | |
| AD-14734 | | | | 18 | | |
| AD-15080 | | | | 29 | | |
| AD-15090 | | | | 23 | | |
| AD-15100 | | | | 26 | | |
| AD-15110 | | | | 23 | | |
| AD-15120 | | | | 20 | | |
| AD-15130 | | | | 20 | | |
| AD-15140 | | | | 19 | | |
| AD-9522 | | 59 | | | | |
| AD-9648 | | 78 | | | | |
| AD-9552 | | 80 | | | | |
| AD-9678 | | 76 | | | | |
| AD-9618 | | 90 | | | | |
| AD-9744 | | 91 | | | | |
| AD-15239 | | | | 38 | | |
| AD-15212 | | | | 19 | | |
| AD-15240 | | | | 43 | | |
| AD-15177 | | | | 59 | | |
| AD-15179 | | | | 13 | | |
| AD-15180 | | | | 15 | | |
| AD-15241 | | | | 14 | | |
| AD-15268 | | | | 42 | | |
| AD-15242 | | | | 21 | | |
| AD-15216 | | | | 28 | | |
| AD-15176 | | | | 35 | | |
| AD-15181 | | | | 35 | | |
| AD-15243 | | | | 22 | | |
| AD-15182 | | | | 42 | | |
| AD-15244 | | | | 31 | | |
| AD-15387 | | | | 23 | | |
| AD-15245 | | | | 18 | | |
| AD-9555 | | 34 | | | | |
| AD-9681 | | 55 | | | | |
| AD-9619 | 42 | 61 | | | | |
| AD-9745 | | 56 | | | | |
| AD-9620 | 44 | 77 | | | | |
| AD-9746 | | 89 | | | | |
| AD-15288 | | | | 19 | | |
| AD-15246 | | | | 16 | | |
| AD-15289 | | | | 37 | | |
| AD-9324 | | 59 | 67 | | | |
| AD-15329 | | | | 103 | | |
| AD-15330 | | | | 62 | | |
| AD-15169 | | | | 22 | | |
| AD-15201 | | | | 6 | | |
| AD-15331 | | | | 14 | | |
| AD-15190 | | | | 47 | | |
| AD-15247 | | | | 61 | | |
| AD-15248 | | | | 22 | | |
| AD-15175 | | | | 45 | | |
| AD-15249 | | | | 51 | | |
| AD-15250 | | | | 96 | | |
| AD-15400 | | | | 12 | | |
| AD-15332 | | | | 22 | | |
| AD-15388 | | | | 30 | | |
| AD-15333 | | | | 20 | | |
| AD-15334 | | | | 96 | | |
| AD-15335 | | | | 75 | | |
| AD-15183 | | | | 16 | | |
| AD-15202 | | | | 41 | | |
| AD-15203 | | | | 39 | | |
| AD-15272 | | | | 49 | | |
| AD-15217 | | | | 16 | | |
| AD-15290 | | | | 15 | | |
| AD-15218 | | | | 13 | | |
| AD-15389 | | | | 13 | | |
| AD-15336 | | | | 40 | | |
| AD-15337 | | | | 19 | | |
| AD-15191 | | | | 33 | | |
| AD-15390 | | | | 25 | | |
| AD-15338 | | | | 9 | | |
| AD-15204 | | | | 33 | | |
| AD-15251 | | | | 76 | | |
| AD-15205 | | | | 14 | | |
| AD-15171 | | | | 16 | | |
| AD-15252 | | | | 58 | | |
| AD-15339 | | | | 20 | | |
| AD-15253 | | | | 15 | | |
| AD-15340 | | | | 18 | | |
| AD-15291 | | | | 17 | | |
| AD-15341 | | | | 11 | | |
| AD-15401 | | | | 13 | | |
| AD-15342 | | | | 30 | | |
| AD-15343 | | | | 21 | | |
| AD-15292 | | | | 16 | | |
| AD-15344 | | | | 20 | | |
| AD-15254 | | | | 18 | | |
| AD-15345 | | | | 18 | | |
| AD-15206 | | | | 15 | | |
| AD-15346 | | | | 16 | | |
| AD-15347 | | | | 62 | | |
| AD-9577 | | 33 | 31 | | | |
| AD-9703 | | 17 | 26 | | | 1 |
| AD-14678 | | | | 22 | | |
| AD-14688 | | | | 23 | | |
| AD-14698 | | | | 23 | | |
| AD-14708 | | | | 14 | | |
| AD-14718 | | | | 31 | | |
| AD-14728 | | | | 25 | | |
| AD-14738 | | | | 31 | | |
| AD-15084 | | | | 19 | | |
| AD-15094 | | | | 11 | | |
| AD-15104 | | | | 16 | | |
| AD-15114 | | | | 15 | | |
| AD-15124 | | | | 11 | | |
| AD-15134 | | | | 12 | | |
| AD-15144 | | | | 9 | | |
| AD-15391 | | | | 7 | | |
| AD-15348 | | | | 13 | | |
| AD-15349 | | | | 8 | | |
| AD-15170 | | | | 40 | | |
| AD-15350 | | | | 14 | | |
| AD-15402 | | | | 27 | | |
| AD-15293 | | | | 27 | | |
| AD-15351 | | | | 14 | | |
| AD-15403 | | | | 11 | | |
| AD-15404 | | | | 38 | | |
| AD-15207 | | | | 15 | | |
| AD-15352 | | | | 23 | | |
| AD-15255 | | | | 31 | | |
| AD-9603 | | 123 | | | | |
| AD-9729 | | 56 | | | | |
| AD-9599 | | 139 | | | | |
| AD-9725 | | 38 | | | | |
| AD-9621 | | 77 | | | | |
| AD-9747 | | 63 | | | | |
| AD-15405 | | | | 32 | | |
| AD-15353 | | | | 39 | | |
| AD-15354 | | | | 49 | | |
| AD-15406 | | | | 35 | | |
| AD-15407 | | | | 39 | | |
| AD-15355 | | | | 18 | | |
| AD-15356 | | | | 50 | | |
| AD-15357 | | | | 54 | | |
| AD-15269 | | | | 23 | | |
| AD-9565 | | 74 | | | | |
| AD-9691 | | 49 | | | | |
| AD-15358 | | | | 12 | | |
| AD-15359 | | | | 24 | | |
| AD-15360 | | | | 13 | | |
| AD-15219 | | | | 19 | | |
| AD-15361 | | | | 24 | | |
| AD-15273 | | | | 36 | | |
| AD-15362 | | | | 31 | | |
| AD-15192 | | | | 20 | | |
| AD-15256 | | | | 19 | | |
| AD-15363 | | | | 33 | | |
| AD-15364 | | | | 24 | | |
| AD-9604 | 35 | 49 | | | | |
| AD-9730 | | 85 | | | | |
| AD-9527 | | 45 | | | | |
| AD-9653 | | 86 | | | | |
| AD-15365 | | | | 62 | | |
| AD-15294 | | | | 30 | | |
| AD-15173 | | | | 12 | | |
| AD-15366 | | | | 21 | | |
| AD-15367 | | | | 11 | | |
| AD-15257 | | | | 18 | | |
| AD-15184 | | | | 50 | | |
| AD-15185 | | | | 12 | | |
| AD-15258 | | | | 73 | | |
| AD-15186 | | | | 36 | | |
| AD-15274 | | | | 19 | | |
| AD-15368 | | | | 7 | | |
| AD-15369 | | | | 17 | | |
| AD-15370 | | | | 19 | | |
| AD-15259 | | | | 38 | | |
| AD-15408 | | | | 52 | | |
| AD-9597 | | 23 | 21 | | 0.04 | |
| AD-9723 | | 12 | 26 | | | 0.5 |
| AD-14680 | | | | 15 | | |
| AD-14690 | | | | 18 | | |
| AD-14700 | | | | 15 | | |
| AD-14710 | | | | 15 | | |
| AD-14720 | | | | 18 | | |
| AD-14730 | | | | 18 | | |
| AD-14740 | | | | 17 | | |
| AD-15086 | | | | 85 | | |
| AD-15096 | | | | 70 | | |
| AD-15106 | | | | 71 | | |
| AD-15116 | | | | 73 | | |
| AD-15126 | | | | 71 | | |
| AD-15136 | | | | 56 | | |
| AD-15146 | | | | 72 | | |
| AD-15260 | | | | 79 | | |
| AD-15371 | | | | 24 | | |
| AD-15372 | | | | 52 | | |
| AD-15172 | | | | 27 | | |
| AD-15295 | | | | 22 | | |
| AD-15373 | | | | 11 | | |
| AD-15163 | | | | 18 | | |
| AD-15165 | | | | 13 | | |
| AD-15374 | | | | 23 | | |
| AD-15296 | | | | 13 | | |
| AD-15261 | | | | 20 | | |
| AD-15375 | | | | 90 | | |
| AD-15262 | | | | 72 | | |
| AD-15376 | | | | 14 | | |
| AD-15377 | | | | 19 | | |
| AD-15409 | | | | 17 | | |
| AD-15378 | | | | 18 | | |
| AD-15410 | | | | 8 | | |
| AD-15379 | | | | 11 | | |
| AD-15187 | | | | 36 | | |
| AD-15263 | | | | 18 | | |
| AD-15264 | | | | 75 | | |
| AD-15297 | | | | 21 | | |
| AD-15208 | | | | 6 | | |
| AD-15209 | | | | 28 | | |
| AD-15193 | | | | 131 | | |
| AD-15380 | | | | 88 | | |
| AD-15298 | | | | 43 | | |
| AD-15299 | | | | 99 | | |
| AD-15265 | | | | 95 | | |
| AD-15381 | | | | 18 | | |
| AD-15210 | | | | 40 | | |
| AD-15270 | | | | 83 | | |
| AD-9591 | 75 | 95 | | | | |
| AD-9717 | | 105 | | | | |
| AD-9622 | | 94 | | | | |
| AD-9748 | | 103 | | | | |
| AD-9587 | | 63 | 49 | | | |
| AD-9713 | | 22 | 25 | | | 0.5 |
| AD-14679 | | | | 19 | | |
| AD-14689 | | | | 24 | | |
| AD-14699 | | | | 19 | | |
| AD-14709 | | | | 21 | | |
| AD-14719 | | | | 24 | | |
| AD-14729 | | | | 23 | | |
| AD-14739 | | | | 24 | | |
| AD-15085 | | | | 74 | | |
| AD-15095 | | | | 60 | | |
| AD-15105 | | | | 33 | | |
| AD-15115 | | | | 30 | | |
| AD-15125 | | | | 54 | | |
| AD-15135 | | | | 51 | | |
| AD-15145 | | | | 49 | | |
| AD-9578 | 49 | 61 | | | | |
| AD-9704 | | 111 | | | | |
| AD-9558 | | 66 | | | | |
| AD-9684 | | 63 | | | | |
| AD-9634 | | 29 | 30 | | | |
| AD-9760 | | 14 | 27 | | | |
| AD-15411 | | | | 5 | | |
| AD-15266 | | | | 23 | | |
| AD-15382 | | | | 12 | | |
| AD-9554 | | 23 | 24 | | | |
| AD-9680 | | 12 | 22 | | 0.1 | 0.1 |
| AD-14676 | | | | 12 | | .1 |
| AD-14686 | | | | 13 | | |
| AD-14696 | | | | 12 | | .1 |
| AD-14706 | | | | 18 | | .1 |
| AD-14716 | | | | 17 | | .1 |
| AD-14726 | | | | 16 | | .1 |
| AD-14736 | | | | 9 | | .1 |
| AD-15082 | | | | 27 | | |
| AD-15092 | | | | 28 | | |
| AD-15102 | | | | 19 | | |
| AD-15112 | | | | 17 | | |
| AD-15122 | | | | 56 | | |
| AD-15132 | | | | 39 | | |
| AD-15142 | | | | 46 | | |
| AD-9553 | | 27 | 22 | | 0.02 | |
| AD-9679 | | 17 | 21 | | | 0.1 |
| AD-14675 | | | | 11 | | |
| AD-14685 | | | | 19 | | |
| AD-14695 | | | | 12 | | |
| AD-14705 | | | | 16 | | |
| AD-14715 | | | | 19 | | |
| AD-14725 | | | | 19 | | |
| AD-14735 | | | | 19 | | |
| AD-15081 | | | | 30 | | |
| AD-15091 | | | | 16 | | |
| AD-15101 | | | | 16 | | |
| AD-15111 | | | | 11 | | |
| AD-15121 | | | | 19 | | |
| AD-15131 | | | | 17 | | |
| AD-15141 | | | | 18 | | |
| AD-9626 | | 97 | 68 | | | |
| AD-9752 | | 28 | 33 | | | |
| AD-9629 | | 23 | 24 | | | |
| AD-9755 | | 28 | 29 | | | 0.5 |
| AD-15412 | | | | 21 | | |
| AD-15211 | | | | 73 | | |
| AD-15300 | | | | 41 | | |

TABLE 2a
Sequences of modified dsRNA targeted to PCSK9

| | | SEQ | | SEQ |
|---|---|---|---|---|
| Duplex | | ID | | ID |
| number | Sense strand sequence (5′-3′)¹ | NO: | Antisense-strand sequence (5′-3′)¹ | NO: |
| AD-10792 | GccuGGAGuuuAuucGGAATsT | 1305 | UUCCGAAuAAACUCcAGGCTsT | 1306 |
| AD-10793 | GccuGGAGuuuAuucGGAATsT | 1307 | uUcCGAAuAAACUccAGGCTsT | 1308 |
| AD-10796 | GccuGGAGuuuAuucGGAATsT | 1309 | UUCCGAAUAAACUCCAGGCTsT | 1310 |
| AD-12038 | GccuGGAGuuuAuucGGAATsT | 1311 | uUCCGAAUAAACUCCAGGCTsT | 1312 |
| AD-12039 | GccuGGAGuuuAuucGGAATsT | 1313 | UuCCGAAUAAACUCCAGGCTsT | 1314 |
| AD-12040 | GccuGGAGuuuAuucGGAATsT | 1315 | UUcCGAAUAAACUCCAGGCTsT | 1316 |
| AD-12041 | GccuGGAGuuuAuucGGAATsT | 1317 | UUCcGAAUAAACUCCAGGCTsT | 1318 |
| AD-12042 | GCCUGGAGUUUAUUCGGAATsT | 1319 | uUCCGAAUAAACUCCAGGCTsT | 1320 |
| AD-12043 | GCCUGGAGUUUAUUCGGAATsT | 1321 | UuCCGAAUAAACUCCAGGCTsT | 1322 |
| AD-12044 | GCCUGGAGUUUAUUCGGAATsT | 1323 | UUcCGAAUAAACUCCAGGCTsT | 1324 |
| AD-12045 | GCCUGGAGUUUAUUCGGAATsT | 1325 | UUCcGAAUAAACUCCAGGCTsT | 1326 |
| AD-12046 | GccuGGAGuuuAuucGGAA | 1327 | UUCCGAAUAAACUCCAGGCscsu | 1328 |
| AD-12047 | GccuGGAGuuuAuucGGAAA | 1329 | UUUCCGAAUAAACUCCAGGCscsu | 1330 |
| AD-12048 | GccuGGAGuuuAuucGGAAAA | 1331 | UUUUCCGAAUAAACUCCAGGCscsu | 1332 |
| AD-12049 | GccuGGAGuuuAuucGGAAAAG | 1333 | CUUUUCCGAAUAAACUCCAGGCscsu | 1334 |
| AD-12050 | GccuGGAGuuuAuucGGAATTab | 1335 | UUCCGAAUAAACUCCAGGCTTab | 1336 |
| AD-12051 | GccuGGAGuuuAuucGGAAATTab | 1337 | UUUCCGAAuAAACUCCAGGCTTab | 1338 |
| AD-12052 | GccuGGAGuuuAuucGGAAAATTab | 1339 | UUUUCCGAAUAAACUCCAGGCTTab | 1340 |
| AD-12053 | GccuGGAGuuuAuucGGAAAAGTTab | 1341 | CUUUUCCGAAUAAACUCCAGGCTTab | 1342 |
| AD-12054 | GCCUGGAGUUUAUUCGGAATsT | 1343 | UUCCGAAUAAACUCCAGGCscsu | 1344 |
| AD-12055 | GccuGGAGuuuAuucGGAATsT | 1345 | UUCCGAAUAAACUCCAGGCscsu | 1346 |
| AD-12056 | GcCuGgAgUuUaUuCgGaA | 1347 | UUCCGAAUAAACUCCAGGCTTab | 1348 |
| AD-12057 | GcCuGgAgUuUaUuCgGaA | 1349 | UUCCGAAUAAACUCCAGGCTsT | 1350 |
| AD-12058 | GcCuGgAgUuUaUuCgGaA | 1351 | UUCCGAAuAAACUCcAGGCTsT | 1352 |
| AD-12059 | GcCuGgAgUuUaUuCgGaA | 1353 | uUcCGAAuAAACUccAGGCTsT | 1354 |
| AD-12060 | GcCuGgAgUuUaUuCgGaA | 1355 | UUCCGaaUAaaCUCCAggc | 1356 |
| AD-12061 | GcCuGgnAgUuUaUuCgGaATsT | 1357 | UUCCGaaUAaaCUCCAggcTsT | 1358 |
| AD-12062 | GcCuGgAgUuUaUuCgGaATTab | 1359 | UUCCGaaUAaaCUCCAggcTTab | 1360 |
| AD-12063 | GcCuGgAgUuUaUuCgGaA | 1361 | UUCCGaaUAaaCUCCAggcscsu | 1362 |
| AD-12064 | GcCuGgnAgUuUaUuCgGaATsT | 1363 | UUCCGAAuAAACUCcAGGCTsT | 1364 |
| AD-12065 | GcCuGgAgUuUaUuCgGaATTab | 1365 | UUCCGAAuAAACUCcAGGCTTab | 1366 |
| AD-12066 | GcCuGgAgUuUaUuCgGaA | 1367 | UUCCGAAuAAACUCcAGGCscsu | 1368 |
| AD-12067 | GcCuGgnAgUuUaUuCgGaATsT | 1369 | UUCCGAAUAAACUCCAGGCTsT | 1370 |
| AD-12068 | GcCuGgAgUuUaUuCgGaATTab | 1371 | UUCCGAAUAAACUCCAGGCTTab | 1372 |
| AD-12069 | GcCuGgAgUuUaUuCgGaA | 1373 | UUCCGAAUAAACUCCAGGCscsu | 1374 |
| AD-12338 | GfcCfuGfgAfgUfuUfaUfuCfgGfaAf | 1375 | P-uUfcCfgAfaUfaAfaCfuCfcAfgGfc | 1376 |
| AD-12339 | GcCuGgAgUuUaUuCgGaA | 1377 | P-uUfcCfgAfaUfaAfaCfuCfcAfgGfc | 1378 |
| AD-12340 | GccuGGAGuuuAuucGGAA | 1379 | P-uUfcCfgAfaUfaAfaCfuCfcAfgGfc | 1380 |
| AD-12341 | GfcCfuGfgAfgUfuUfaUfuCfgGfaAfTsT | 1381 | P-uUfcCfgAfaUfaAfaCfuCfcAfgGfcTsT | 1382 |
| AD-12342 | GfcCfuGfgAfgUfuUfaUfuCfgGfaAfTsT | 1383 | UUCCGAAuAAACUCcAGGCTsT | 1384 |
| AD-12343 | GfcCfuGfgAfgUfuUfaUfuCfgGfaAfTsT | 1385 | uUcCGAAuAAACUccAGGCTsT | 1386 |
| AD-12344 | GfcCfuGfgAfgUfuUfaUfuCfgGfaAfTsT | 1387 | UUCCGAAUAAACUCCAGGCTsT | 1388 |
| AD-12345 | GfcCfuGfgAfgUfuUfaUfuCfgGfaAfTsT | 1389 | UUCCGAAUAAACUCCAGGCscsu | 1390 |
| AD-12346 | GfcCfuGfgAfgUfuUfaUfuCfgGfaAfTsT | 1391 | UUCCGaaUAaaCUCCAggcscsu | 1392 |
| AD-12347 | GCCUGGAGUUUAUUCGGAATsT | 1393 | P-uUfcCfgAfaUfaAfaCfuCfcAfgGfcTsT | 1394 |
| AD-12348 | GccuGGAGuuuAuucGGAATsT | 1395 | P-uUfcCfgAfaUfaAfaCfuCfcAfgGfcTsT | 1396 |
| AD-12349 | GcCuGgnAgUuUaUuCgGaATsT | 1397 | P-uUfcCfgAfaUfaAfaCfuCfcAfgGfcTsT | 1398 |
| AD-12350 | GfcCfuGfgAfgUfuUfaUfuCfgGfaAfTTab | 1399 | P-uUfcCfgAfaUfaAfaCfuCfcAfgGfcTTab | 1400 |
| AD-12351 | GfcCfuGfgAfgUfuUfaUfuCfgGfaAf | 1401 | P-uUfcCfgAfaUfaAfaCfuCfcAfgGfcsCfsu | 1402 |
| AD-12352 | GfcCfuGfgAfgUfuUfaUfuCfgGfaAf | 1403 | UUCCGaaUAaaCUCCAggcscsu | 1404 |
| AD-12354 | GfcCfuGfgAfgUfuUfaUfuCfgGfaAf | 1405 | UUCCGAAUAAACUCCAGGCscsu | 1406 |
| AD-12355 | GfcCfuGfgAfgUfuUfaUfuCfgGfaAf | 1407 | UUCCGAAuAAACUCcAGGCTsT | 1408 |
| AD-12356 | GfcCfuGfgAfgUfuUfaUfuCfgGfaAf | 1409 | uUcCGAAuAAACUccAGGCTsT | 1410 |
| AD-12357 | GmocCmouGmogAm02gUmouUmoaUmouCm | 1411 | UUCCGaaUAaaCUCCAggc | 1412 |
| | ogGmoaA | | | |
| AD-12358 | GmocCmouGmogAm02gUmouUmoaUmouCm | 1413 | P-uUfcCfgAfaUfaAfaCfuCfcAfgGfc | 1414 |
| | ogGmoaA | | | |
| AD-12359 | GmocCmouGmogAm02gUmouUmoaUmouCm | 1415 | P-uUfcCfgAfaUfaAfaCfuCfcAfgGfcsCfsu | 1416 |
| | ogGmoaA | | | |
| AD-12360 | GmocCmouGmogAm02gUmouUmoaUmouCm | 1417 | UUCCGAAUAAACUCCAGGCscsu | 1418 |
| | ogGmoaA | | | |
| AD-12361 | GmocCmouGmogAm02gUmouUmoaUmouCm | 1419 | UUCCGAAuAAACUCcAGGCTsT | 1420 |
| | ogGmoaA | | | |
| AD-12362 | GmocCmouGmogAm02gUmouUmoaUmouCm | 1421 | uUcCGAAuAAACUccAGGCTsT | 1422 |
| | ogGmoaA | | | |
| AD-12363 | GmocCmouGmogAm02gUmouUmoaUmouCm | 1423 | UUCCGaaUAaaCUCCAggcscsu | 1424 |
| | ogGmoaA | | | |
| AD-12364 | GmocCmouGmogAmogUmouUmoaUmouCmo | 1425 | UUCCGaaUAaaCUCCAggcTsT | 1426 |
| | gGmoaATsT | | | |
| AD-12365 | GmocCmouGmogAmogUmouUmoaUmouCmo | 1427 | UUCCGAAuAAACUCcAGGCTsT | 1428 |
| | gGmoaATsT | | | |
| AD-12366 | GmocCmouGmogAmogUmouUmoaUmouCmo | 1429 | UUCCGAAUAAACUCCAGGCTsT | 1430 |
| | gGmoaATsT | | | |
| AD-12367 | GmocmocmouGGAGmoumoumouAmoumoum | 1431 | UUCCGaaUAaaCUCCAggcTsT | 1432 |
| | ocGGAATsT | | | |
| AD-12368 | GmocmocmouGGAGmoumoumouAmoumoum | 1433 | UUCCGAAuAAACUCcAGGCTsT | 1434 |
| | ocGGAATsT | | | |
| AD-12369 | GmocmocmouGGAGmoumoumouAmoumoum | 1435 | UUCCGAAUAAACUCCAGGCTsT | 1436 |
| | ocGGAATsT | | | |
| AD-12370 | GmocmocmouGGAGmoumoumouAmoumoum | 1437 | P-UfaCfCfGAAUfAAACMCfCfAGGCfTsT | 1438 |
| | ocGGAATsT | | | |
| AD-12371 | GmocmocmouGGAGmoumoumouAmoumoum | 1439 | P-UfUfCfCfGAAUfAAACfUfCfCfAGGCfsCfsUf | 1440 |
| | ocGGAATsT | | | |
| AD -12372 | GmocmocmouGGAGmoumoumouAmoumoum | 1441 | P-uUfcCfgAfaUfaAfaCfuCfcAfgGfcsCfsu | 1442 |
| | ocGGAATsT | | | |
| AD -12373 | GmocmocmouGGAGmoumoumouAmoumoum | 1443 | UUCCGAAUAAACUCCAGGCTsT | 1444 |
| | ocGGAATsT | | | |
| AD-12374 | GCfCfUfGGAGUfUfUfAUfUfCfGGAATsT | 1445 | UfUfCfCfGAAUfAAACfUfCfCfAGGCfTsT | 1446 |
| AD-12375 | GCfCfUfGGAGUfUfUfAUfUfCfGGAATsT | 1447 | UUCCGAAUAAACUCCAGGCTsT | 1448 |
| AD-12377 | GCfCfUfGGAGUfUfUfAUfUfCfGGAATsT | 1449 | uUcCGAAuAAACUccAGGCTsT | 1450 |
| AD-12378 | GCfCfUfGGAGUfUfUfAUfUfCfGGAATsT | 1451 | UUCCGaaUAaaCUCCAggcscsu | 1452 |
| AD-12379 | GCfCfUfGGAGUfUfUfAUfUfCfGGAATsT | 1453 | UUCCGAAUAAACUCCAGGCscsu | 1454 |
| AD-12380 | GCfCfUfGGAGUfUfUfAUfUfCfGGAATsT | 1455 | P-uUfcCfgAfaUfaAfaCfuCfcAfgGfcsCfsu | 1456 |
| AD-12381 | GCfCfUfGGAGUfUfUfAUfUfCfGGAATsT | 1457 | P-uUfcCfgAfaUfaAfaCfuCfcAfgGfcTsT | 1458 |
| AD-12382 | GCfCfUfGGAGUfUfUfAUfUfCfGGAATsT | 1459 | P-UfUfCfCfGAAUfAAACfUfCfCfAGGCfTsT | 1460 |
| AD-12383 | GCCUGGAGUUUAUUCGGAATsT | 1461 | P-UfUfCfCfGAAUfAAACfUfCfCfAGGCfTsT | 1462 |
| AD-12384 | GccuGGAGuuuAuucGGAATsT | 1463 | P-UfUfCfCfGAAUfAAACfUfCfCfAGGCfTsT | 1464 |
| AD-12385 | GcCuGgnAgUuUaUuCgGaATsT | 1465 | P-UfUfCfCfGAAUfAAACfUfCfCfAGGCfTsT | 1466 |
| AD-12386 | GfcCfuGfgAfgUfuUfaUfuCfgGfaAf | 1467 | P-UfUfCfCfGAAUfAAACfUfCfCfAGGCfTsT | 1468 |
| AD-12387 | GCfCfUfGGAGGUfUfUfAUfUfCfGGAA | 1469 | UfUfCfCfGAAUfAAACfUfCfCfAGGCfsCfsUf | 1470 |
| AD-12388 | GCfCfUfGGAGGUfUfUfAUfUfCfGGAA | 1471 | P-uUfcCfgAfaUfaAfaCfuCfcAfgGfc | 1472 |
| AD-12389 | GCfCfUfGGAGGUfUfUfAUfUfCfGGAA | 1473 | P-uUfcCfgAfaUfaAfaCfuCfcAfgGfcsCfsu | 1474 |
| AD-12390 | GCfCfUfGGAGGUfUfUfAUfUfCfGGAA | 1475 | UUCCGAAUAAACUCCAGGCscsu | 1476 |
| AD-12391 | GCfCfUfGGAGGUfUfUfAUfUfCfGGAA | 1477 | UUCCGaaUAaaCUCCAggc | 1478 |
| AD-12392 | GCfCfUfGGAGGUfUfUfAUfUfCfGGAA | 1479 | UUCCGAAUAAACUCCAGGCTsT | 1480 |
| AD-12393 | GCfCfUfGGAGGUfUfUfAUfUfCfGGAA | 1481 | UUCCGAAuAAACUCcAGGCTsT | 1482 |
| AD-12394 | GCfCfUfGGAGGUfUfUfAUfUfCfGGAA | 1483 | uUcCGAAuAAACUccAGGCTsT | 1484 |
| AD-12395 | GmocCmouGmogAmogUmouUmoaUmouCmo | 1485 | P-UfUfCfCfGAAUfAAACfUfCfCfAGGCfsCfsUf | 1486 |
| | gGmoaATsT | | | |
| AD-12396 | GmocCmouGmogAm02gUmouUmoaUmouCm | 1487 | P-UfUfCfCfGAAUfAAACfUfCfCfAGGCfsCfsUf | 1488 |
| | ogGmoaA | | | |
| AD-12397 | GfcCfuGfgAfgUfuUfaUfuCfgGfaAf | 1489 | P-UfUfCfCfGAAUfAAACfUfCfCfAGGCfsCfsUf | 1490 |
| AD-12398 | GfcCfuGfgAfgUfuUfaUfuCfgGfaAfTsT | 1491 | P-UfUfCfCfGAAUfAAACfUfCfCfAGGCfsCfsUf | 1492 |
| AD-12399 | GcCuGgnAgUuUaUuCgGaATsT | 1493 | P-UfUfCfCfGAAUfAAACfUfCfCfAGGCfsCfsUf | 1494 |
| AD-12400 | GCCUGGAGUUUAUUCGGAATsT | 1495 | P-UfUfCfCfGAAUfAAACfUfCfCfAGGCfsCfsUf | 1496 |
| AD-12401 | GccuGGAGuuuAuucGGAATsT | 1497 | P-UfUfCfCfGAAUfAAACfUfCfCfAGGCfsCfsUf | 1498 |
| AD-12402 | GccuGGAGuuuAuucGGAA | 1499 | P-UfUfCfCfGAAUfAAACfUfCfCfAGGCfsCfsUf | 1500 |
| AD-12403 | GCfCfUfGGAGGUfUfUfAUfUfCfGGAA | 1501 | P-UfUfCfCfGAAUfAAACfUfCfCfAGGCfsCfsUf | 1502 |
| AD-9314 | GCCUGGAGUUUAUUCGGAATsT | 1503 | UUCCGAAUAAACUCCAGGCTsT | 1504 |
| AD-10794 | ucAuAGGccuGGAGuuuAudTsdT | 1525 | AuAAACUCcAGGCCuAUGAdTsdT | 1526 |
| AD-10795 | ucAuAGGccuGGAGuuuAudTsdT | 1527 | AuAAACUccAGGcCuAuGAdTsdT | 1528 |
| AD-10797 | ucAuAGGccuGGAGuuuAudTsdT | 1529 | AUAAACUCCAGGCCUAUGAdTsdT | 1530 |

[0541] U, C, A, G: corresponding ribonucleotide; T: deoxythymidine; u, c, a, g: corresponding 2′-O-methyl ribonucleotide; Uf, Cf, Af, Gf: corresponding 2′-deoxy-2′-fluoro ribonucleotide; moc, mou, mog, moa: corresponding 2′-MOE nucleotide; where nucleotides are written in sequence, they are connected by 3′-5′ phosphodiester groups; ab: 3′-terminal abasic nucleotide; nucleotides with interjected “s” are connected by 3′-O-5′-O phosphorothiodiester groups; unless denoted by prefix “p-”, oligonucleotides are devoid of a 5′-phosphate group on the 5′-most nucleotide; all oligonucleotides bear 3′-OH on the 3′-most nucleotide

TABLE 2b
Screening of dsRNAs targeted to PCSK9

| | Remaining mRNA in |
|---|---|
| | % of controls at |
| Duplex number | siRNA conc. of 30 nM |
| AD-10792 | 15 |
| AD-10793 | 32 |
| AD-10796 | 13 |
| AD-12038 | 13 |
| AD-12039 | 29 |
| AD-12040 | 10 |
| AD-12041 | 11 |
| AD-12042 | 12 |
| AD-12043 | 13 |
| AD-12044 | 7 |
| AD-12045 | 8 |
| AD-12046 | 13 |
| AD-12047 | 17 |
| AD-12048 | 43 |
| AD-12049 | 34 |
| AD-12050 | 16 |
| AD-12051 | 31 |
| AD-12052 | 81 |
| AD-12053 | 46 |
| AD-12054 | 8 |
| AD-12055 | 13 |
| AD-12056 | 11 |
| AD-12057 | 8 |
| AD-12058 | 9 |
| AD-12059 | 23 |
| AD-12060 | 10 |
| AD-12061 | 7 |
| AD-12062 | 10 |
| AD-12063 | 19 |
| AD-12064 | 15 |
| AD-12065 | 16 |
| AD-12066 | 20 |
| AD-12067 | 17 |
| AD-12068 | 18 |
| AD-12069 | 13 |
| AD-12338 | 15 |
| AD-12339 | 14 |
| AD-12340 | 19 |
| AD-12341 | 12 |
| AD-12342 | 13 |
| AD-12343 | 24 |
| AD-12344 | 9 |
| AD-12345 | 12 |
| AD-12346 | 13 |
| AD-12347 | 11 |
| AD-12348 | 8 |
| AD-12349 | 11 |
| AD-12350 | 17 |
| AD-12351 | 11 |
| AD-12352 | 11 |
| AD-12354 | 11 |
| AD-12355 | 9 |
| AD-12356 | 25 |
| AD-12357 | 56 |
| AD-12358 | 29 |
| AD-12359 | 30 |
| AD-12360 | 15 |
| AD-12361 | 20 |
| AD-12362 | 51 |
| AD-12363 | 11 |
| AD-12364 | 25 |
| AD-12365 | 18 |
| AD-12366 | 23 |
| AD-12367 | 42 |
| AD-12368 | 40 |
| AD-12369 | 26 |
| AD-12370 | 68 |
| AD-12371 | 60 |
| AD-12372 | 60 |
| AD-12373 | 55 |
| AD-12374 | 9 |
| AD-12375 | 16 |
| AD-12377 | 88 |
| AD-12378 | 6 |
| AD-12379 | 6 |
| AD-12380 | 8 |
| AD-12381 | 10 |
| AD-12382 | 7 |
| AD-12383 | 7 |
| AD-12384 | 8 |
| AD-12385 | 8 |
| AD-12386 | 11 |
| AD-12387 | 13 |
| AD-12388 | 19 |
| AD-12389 | 16 |
| AD-12390 | 17 |
| AD-12391 | 21 |
| AD-12392 | 28 |
| AD-12393 | 17 |
| AD-12394 | 75 |
| AD-12395 | 55 |
| AD-12396 | 59 |
| AD-12397 | 20 |
| AD-12398 | 11 |
| AD-12399 | 13 |
| AD-12400 | 12 |
| AD-12401 | 13 |
| AD-12402 | 14 |
| AD-12403 | 4 |
| AD-9314 | 9 |

TABLE 3
Cholesterol levels of rats treated with LNP01-10792
Dosage of 5 mg/kg, n = 6 rats per group

| Day | Total serum cholesterol (relative to PBS control) |
|---|---|
| 2 | 0.329 ± 0.035 |
| 4 | 0.350 ± 0.055 |
| 7 | 0.402 ± 0.09 |
| 9 | 0.381 ± 0.061 |
| 11 | 0.487 ± 0.028 |
| 14 | 0.587 ± 0.049 |
| 16 | 0.635 ± 0.107 |
| 18 | 0.704 ± 0.060 |
| 21 | 0.775 ± 0.102 |
| 28 | 0.815 ± 0.103 |

TABLE 4
Serum LDL-C levels of cynomolgus monkeys treated with LNP formulated dsRNAs

| | Serum LDL-C (relative to pre-dose) | | | | | |
|---|---|---|---|---|---|---|
| | Day 3 | Day 4 | Day 5 | Day 7 | Day 14 | Day 21 |
| PBS | 1.053 ± 0.158 | 0.965 ± 0.074 | 1.033 ± 0.085 | 1.033 ± 0.157 | 1.009 ± 0.034 | |
| n = 3 | | | | | | |
| LNP01-1955 | | 1.027 ± 0.068 | | 1.104 ± 0.114 | | |
| n = 3 | | | | | | |
| LNP01-10792 | 0.503 ± 0.055 | 0.596 ± 0.111 | 0.674 ± 0.139 | 0.644 ± 0.121 | 0.958 ± 0.165 | 1.111 ± 0.172 |
| n = 5 | | | | | | |
| LNP01-9680 | 0.542 ± 0.155 | 0.437 ± 0.076 | 0.505 ± 0.071 | 0.469 ± 0.066 | 0.596 ± 0.080 | 0.787 ± 0.138 |
| n = 4 | | | | | | |

TABLE 5a
Modified dsRNA targeted to PCSK9

| | Position | | | | SEQ |
|---|---|---|---|---|---|
| | in human | | | | ID |
| Name | access.# | Sense | Antisense | Sequence 5′-3′ | NO: |
| AD- | 1091 | unmodified | unmodified | GCCUGGAGUUUAUUCGGAAdTdT | 1505 |
| 1a1 | | | | UUCCGAAUAAACUCCAGGCdTsdT | 1506 |
| AD- | 1091 | 2′OMe | 2′OMe | GccuGGAGuuuAuucGGAAdTsdT | 1507 |
| 1a2 | | | | UUCCGAAuAAACUCcAGGCdTsdT | 1508 |
| AD- | 1091 | Alt 2′F, | Alt 2′F, | GfcCfuGfgAfgUfuUfaUfuCfgGfaAfdTdT | 1509 |
| 1a3 | | 2′OMe | 2′OMe | puUfcCfgAfaUfaAfaCfuCfcAfgGfcdTsdT | 1510 |
| AD- | 1091 | 2′OMe | 2′F all Py, | GccuGGAGuuuAuucGGAAdTsdT | 1511 |
| 1a4 | | | 5′Phosphate | PUfUfCfCfGAAUfAAACfUfCfCfAGGCfdTsdT | 1512 |
| AD- | 1091 | 2′F | 2′F all Py, | GCfCfUfGGAGUfUfUfAUfUfCfGGAAdTsdT | 1513 |
| 1a5 | | | 5′Phosphate | PUfUfCfCfGAAUfAAACfUfCfCfAGGCfdTsdT | 1514 |
| AD-2a1 | 3530 | 2′OMe | 2′OMe | uucuAGAccuGuuuuGcuudTsdT | 1515 |
| | (3′UTR) | | | AAGcAAAAcAGGUCuAGAAdTsdT | 1516 |
| AD-3a1 | 833 | 2′OMe | 2′OMe | AGGuGuAucuccuAGAcAcdTsdT | 1517 |
| | | | | GUGUCuAGGAGAuAcACCUdTsdT | 1518 |
| AD- | N/A | 2′OMe | 2′OMe | cuuAcGcuGAGuAcuucGAdTsdT | 1519 |
| ctrl | | | | UCGAAGuACUcAGCGuAAGdTsdT | 1520 |
| (Luc.) | | | | | |

U, C, A, G: corresponding ribonucleotide; T: deoxythymidine; u, c, a, g: corresponding 2′-O-methyl ribonucleotide; Uf, Cf, Af, Gf: corresponding 2′-deoxy-2′-fluoro ribonucleotide; where nucleotides are written in sequence, they are connected by 3′-5′ phosphodiester groups; nucleotides with interjected ″s″ are connected by 3′-O-5′-O phosphorothiodiester groups; unless denoted by prefix ″p-″, oligonucleotides are devoid of a 5′-phosphate group on the 5′-most nucleotide; all oligonucleotides bear 3′-OH on the 3′-most nucleotide.

TABLE 5b
Silencing activity of modified dsRNA in monkey hepatocytes

| | | | | | Primary |
|---|---|---|---|---|---|
| | Position in | IFN-α/ | | | Cynomolgus Monkey |
| | human | TNF-α | | | Hepatocytes |
| Name | access.# | Induction | Sense | Antisense | ~IC50, nM |
| AD-1a1 | 1091 | Yes/Yes | unmodified | unmodified | 0.07-0.2 |
| AD-1a2 | 1091 | No/No | 2′OMe | 2′OMe | 0.07-0.2 |
| AD-1a3 | 1091 | No/No | Alt 2′F, | Alt 2′F, 2′OMe | 0.07-0.2 |
| | | | 2′OMe | | |
| AD-1a4 | 1091 | No/No | 2′OMe | 2′F all Py, | 0.07-0.2 |
| | | | | 5′Phosphate | |
| AD-1a5 | 1091 | No/No | 2′F | 2′F all Py, | 0.07-0.2 |
| | | | | 5′Phosphate | |
| AD-2a1 | 3530 | No/No | 2′OMe | 2′OMe | 0.07-0.2 |
| | (3′UTR) | | | | |
| AD-3a1 | 833 | No/No | 2′OMe | 2′OMe | 0.1-0.3 |
| AD-ctrl | N/A | No/No | 2′OMe | 2′OMe | N/A |
| (Luc.) | | | | | |

TABLE 6
dsRNA targeted to PCSK9: mismatches and modifications

| | | SEQ ID | |
|---|---|---|---|
| Duplex # | Strand | NO: | Sequence 5′ to 3′ |
| AD-9680 | S | 1531 | uucuAGAccuGuuuuGcuudTsdT |
| | AS | 1532 | AAGcAAAAcAGGUCuAGAAdTsdT |
| AD-3267 | S | 1535 | uucuAGAcCuGuuuuGcuuTsT |
| | AS | 1536 | AAGcAAAAcAGGUCuAGAATsT |
| AD-3268 | S | 1537 | uucuAGAccUGuuuuGcuuTsT |
| | AS | 1538 | AAGcAAAAcAGGUCuAGAATsT |
| AD-3269 | S | 1539 | uucuAGAcCUGuuuuGcuuTsT |
| | AS | 1540 | AAGcAAAAcAGGUCuAGAATsT |
| AD-3270 | S | 1541 | uucuAGAcY1uGuuuuGcuuTsT |
| | AS | 1542 | AAGcAAAAcAGGUCuAGAATsT |
| AD-3271 | S | 1543 | uucuAGAcY1UGuuuuGcuuTsT |
| | AS | 1544 | AAGcAAAAcAGGUCuAGAATsT |
| AD-3272 | S | 1545 | uucuAGAccY1GuuuuGcuuTsT |
| | AS | 1546 | AAGcAAAAcAGGUCuAGAATsT |
| AD-3273 | S | 1547 | uucuAGAcCY1GuuuuGcuuTsT |
| | AS | 1548 | AAGcAAAAcAGGUCuAGAATsT |
| AD-3274 | S | 1549 | uucuAGAccuY1uuuuGcuuTsT |
| | AS | 1550 | AAGcAAAAcAGGUCuAGAATsT |
| AD-3275 | S | 1551 | uucuAGAcCUY1uuuuGcuuTsT |
| | AS | 1552 | AAGcAAAAcAGGUCuAGAATsT |
| AD-14676 | S | 1553 | UfuCfuAfgAfcCfuGfuUfuUfgCfuUfTsT |
| | AS | 1554 | p-aAfgCfaAfaAfcAfgGfuCfuAfgAfaTsT |
| AD-3276 | S | 1555 | UfuCfuAfgAfcCuGfuUfuUfgCfuUfTsT |
| | AS | 1556 | p-aAfgCfaAfaAfcAfgGfuCfuAfgAfaTsT |
| AD-3277 | S | 1557 | UfuCfuAfgAfcCfUGfuUfuUfgCfuUfTsT |
| | AS | 1558 | p-aAfgCfaAfaAfcAfgGfuCfuAfgAfaTsT |
| AD-3278 | S | 1559 | UfuCfuAfgAfcCUGfuUfuUfgCfuUfTsT |
| | AS | 1560 | p-aAfgCfaAfaAfcAfgGfuCfuAfgAfaTsT |
| AD-3279 | S | 1561 | UfuCfuAfgAfcYluGfuUfuUfgCfuUfTsT |
| | AS | 1562 | p-aAfgCfaAfaAfcAfgGfuCfuAfgAfaTsT |
| AD-3280 | S | 1563 | UfuCfuAfgAfcY1UGfuUfuUfgCfuUfTsT |
| | AS | 1564 | p-aAfgCfaAfaAfcAfgGfuCfuAfgAfaTsT |
| AD-3281 | S | 1565 | UfuCfuAfgAfcCfY1GfuUfuUfgCfuUfTsT |
| | AS | 1566 | p-aAfgCfaAfaAfcAfgGfuCfuAfgAfaTsT |
| AD-3282 | S | 1567 | UfuCfuAfgAfcCY1GfuUfuUfgCfuUfTsT |
| | AS | 1568 | p-aAfgCfaAfaAfcAfgGfuCfuAfgAfaTsT |
| AD-3283 | S | 1569 | UfuCfuAfgAfcCfuY1uUfuUfgCfuUfTsT |
| | AS | 1570 | p-aAfgCfaAfaAfcAfgGfuCfuAfgAfaTsT |
| AD-3284 | S | 1571 | UfuCfuAfgAfcCUY1uUfuUfgCfuUfTsT |
| | AS | 1572 | p-aAfgCfaAfaAfcAfgGfuCfuAfgAfaTsT |
| AD-10792 | S | 459 | GccuGGAGuuuAuucGGAATsT |
| | AS | 460 | UUCCGAAuAAACUCcAGGCTsT |
| AD-3254 | S | 1573 | GccuGGAGuY1uAuucGGAATsT |
| | AS | 1574 | UUCCGAAuAAACUCcAGGCTsT |
| AD-3255 | S | 1575 | GccuGGAGUY1uAuucGGAATsT |
| | AS | 1576 | UUCCGAAuAAACUCcAGGCTsT |

Strand: S/Sense; AS/Antisense
U, C, A, G: corresponding ribonucleotide; T: deoxythymidine; u, c, a, g: corresponding 2′-O-methyl ribonucleotide; Uf, Cf, Af, Gf: corresponding 2′-deoxy-2′-fluoro ribonucleotide; Y1 corresponds to DFT difluorotoluyl ribo(or deoxyribo)nucleotide; where nucleotides are written in sequence, they are connected by 3′-5′ phosphodiester groups; nucleotides with interjected ″s″ are connected by 3′-O-5′-O phosphorothiodiester groups; unless denoted by prefix ″p-″, oligonucleotides are devoid of a 5′-phosphate group on the 5′-most nucleotide; all oligonucleotides bear 3′-OH on the 3′-most nucleotide

TABLE 7
Sequences of unmodified siRNA flanking AD-9680

| | | | Target | |
|---|---|---|---|---|
| Duplex | Type | Sequence (5′ to 3′) | site | SEQ ID NO: |
| AD-22169-b1 | sense | CAGCCAACUUUUCUAGACCdTsdT | 3520 | 1577 |
| | antis | GGUCUAGAAAAGUUGGCUGdTsdT | 3520 | 1578 |
| AD-22170-b1 | sense | AGCCAACUUUUCUAGACCUdTsdT | 3521 | 1579 |
| | antis | AGGUCUAGAAAAGUUGGCUdTsdT | 3521 | 1580 |
| AD-22171-b1 | sense | GCCAACUUUUCUAGACCUGdTsdT | 3522 | 1581 |
| | antis | CAGGUCUAGAAAAGUUGGCdTsdT | 3522 | 1582 |
| AD-22172-b1 | sense | CCAACUUUUCUAGACCUGUdTsdT | 3523 | 1583 |
| | antis | ACAGGUCUAGAAAAGUUGGdTsdT | 3523 | 1584 |
| AD-22173-b1 | sense | CAACUUUUCUAGACCUGUUdTsdT | 3524 | 1585 |
| | antis | AACAGGUCUAGAAAAGUUGdTsdT | 3524 | 1586 |
| AD-22174-b1 | sense | AACUUUUCUAGACCUGUUUdTsdT | 3525 | 1587 |
| | antis | AAACAGGUCUAGAAAAGUUdTsdT | 3525 | 1588 |
| AD-22175-b1 | sense | ACUUUUCUAGACCUGUUUUdTsdT | 3526 | 1589 |
| | antis | AAAACAGGUCUAGAAAAGUdTsdT | 3526 | 1590 |
| AD-22176-b1 | sense | CUUUUCUAGACCUGUUUUGdTsdT | 3527 | 1591 |
| | antis | CAAAACAGGUCUAGAAAAGdTsdT | 3527 | 1592 |
| AD-22177-b1 | sense | UUUUCUAGACCUGUUUUGCdTsdT | 3528 | 1593 |
| | antis | GCAAAACAGGUCUAGAAAAdTsdT | 3528 | 1594 |
| AD-22178-b1 | sense | UUUCUAGACCUGUUUUGCUdTsdT | 3529 | 1595 |
| | antis | AGCAAAACAGGUCUAGAAAdTsdT | 3529 | 1596 |
| AD-22179-b1 | sense | UCUAGACCUGUUUUGCUUUdTsdT | 3531 | 1597 |
| | antis | AAAGCAAAACAGGUCUAGAdTsdT | 3531 | 1598 |
| AD-22180-b1 | sense | CUAGACCUGUUUUGCUUUUdTsdT | 3532 | 1599 |
| | antis | AAAAGCAAAACAGGUCUAGdTsdT | 3532 | 1600 |
| AD-22181-b1 | sense | UAGACCUGUUUUGCUUUUGdTsdT | 3533 | 1601 |
| | antis | CAAAAGCAAAACAGGUCUAdTsdT | 3533 | 1602 |
| AD-22182-b1 | sense | AGACCUGUUUUGCUUUUGUdTsdT | 3534 | 1603 |
| | antis | ACAAAAGCAAAACAGGUCUdTsdT | 3534 | 1604 |
| AD-22183-b1 | sense | GACCUGUUUUGCUUUUGUAdTsdT | 3535 | 1605 |
| | antis | UACAAAAGCAAAACAGGUCdTsdT | 3535 | 1606 |
| AD-22184-b1 | sense | ACCUGUUUUGCUUUUGUAAdTsdT | 3536 | 1607 |
| | antis | UUACAAAAGCAAAACAGGUdTsdT | 3536 | 1608 |
| AD-22185-b1 | sense | CCUGUUUUGCUUUUGUAACdTsdT | 3537 | 1609 |
| | antis | GUUACAAAAGCAAAACAGGdTsdT | 3537 | 1610 |
| AD-22186-b1 | sense | CUGUUUUGCUUUUGUAACUdTsdT | 3538 | 1611 |
| | antis | AGUUACAAAAGCAAAACAGdTsdT | 3538 | 1612 |
| AD-22187-b1 | sense | UGUUUUGCUUUUGUAACUUdTsdT | 3539 | 1613 |
| | antis | AAGUUACAAAAGCAAAACAdTsdT | 3539 | 1614 |
| AD-22188-b1 | sense | GUUUUGCUUUUGUAACUUGdTsdT | 3540 | 1615 |
| | antis | CAAGUUACAAAAGCAAAACdTsdT | 3540 | 1616 |
| AD-22189-b1 | sense | UUUUGCUUUUGUAACUUGAdTsdT | 3541 | 1617 |
| | antis | UCAAGUUACAAAAGCAAAAdTsdT | 3541 | 1618 |
| AD-22190-b1 | sense | UUUGCUUUUGUAACUUGAAdTsdT | 3542 | 1619 |
| | antis | UUCAAGUUACAAAAGCAAAdTsdT | 3542 | 1620 |
| AD-22191-b1 | sense | UUGCUUUUGUAACUUGAAGdTsdT | 3543 | 1621 |
| | antis | CUUCAAGUUACAAAAGCAAdTsdT | 3543 | 1622 |
| AD-22192-b1 | sense | UGCUUUUGUAACUUGAAGAdTsdT | 3544 | 1623 |
| | antis | UCUUCAAGUUACAAAAGCAdTsdT | 3544 | 1624 |
| AD-22193-b1 | sense | GCUUUUGUAACUUGAAGAUdTsdT | 3545 | 1625 |
| | antis | AUCUUCAAGUUACAAAAGCdTsdT | 3545 | 1626 |
| AD-22194-b1 | sense | CUUUUGUAACUUGAAGAUAdTsdT | 3546 | 1627 |
| | antis | UAUCUUCAAGUUACAAAAGdTsdT | 3546 | 1628 |
| AD-22195-b1 | sense | UUUUGUAACUUGAAGAUAUdTsdT | 3547 | 1629 |
| | antis | AUAUCUUCAAGUUACAAAAdTsdT | 3547 | 1630 |
| AD-22196-b1 | sense | UUUGUAACUUGAAGAUAUUdTsdT | 3548 | 1631 |
| | antis | AAUAUCUUCAAGUUACAAAdTsdT | 3548 | 1632 |
| AD-22197-b1 | sense | UUGUAACUUGAAGAUAUUUdTsdT | 3549 | 1633 |
| | antis | AAAUAUCUUCAAGUUACAAdTsdT | 3549 | 1634 |
| AD-22198-b1 | sense | UGUAACUUGAAGAUAUUUAdTsdT | 3550 | 1635 |
| | antis | UAAAUAUCUUCAAGUUACAdTsdT | 3550 | 1636 |
| AD-22199-b1 | sense | GUAACUUGAAGAUAUUUAUdTsdT | 3551 | 1637 |
| | antis | AUAAAUAUCUUCAAGUUACdTsdT | 3551 | 1638 |
| AD-22200-b1 | sense | UAACUUGAAGAUAUUUAUUdTsdT | 3552 | 1639 |
| | antis | AAUAAAUAUCUUCAAGUUAdTsdT | 3552 | 1640 |
| AD-22201-b1 | sense | AACUUGAAGAUAUUUAUUCdTsdT | 3553 | 1641 |
| | antis | GAAUAAAUAUCUUCAAGUUdTsdT | 3553 | 1642 |
| AD-22202-b1 | sense | ACUUGAAGAUAUUUAUUCUdTsdT | 3554 | 1643 |
| | antis | AGAAUAAAUAUCUUCAAGUdTsdT | 3554 | 1644 |
| AD-22203-b1 | sense | CUUGAAGAUAUUUAUUCUGdTsdT | 3555 | 1645 |
| | antis | CAGAAUAAAUAUCUUCAAGdTsdT | 3555 | 1646 |
| AD-22204-b1 | sense | UUGAAGAUAUUUAUUCUGGdTsdT | 3556 | 1647 |
| | antis | CCAGAAUAAAUAUCUUCAAdTsdT | 3556 | 1648 |
| AD-22205-b1 | sense | UGAAGAUAUUUAUUCUGGGdTsdT | 3557 | 1649 |
| | antis | CCCAGAAUAAAUAUCUUCAdTsdT | 3557 | 1650 |
| AD-22206-b1 | sense | GAAGAUAUUUAUUCUGGGUdTsdT | 3558 | 1651 |
| | antis | ACCCAGAAUAAAUAUCUUCdTsdT | 3558 | 1652 |

TABLE 8
Sequences of modified siRNA flanking AD-9680

| Duplex | Type | Sequence (5′ to 3′) | Target | SEQ ID NO: |
|---|---|---|---|---|
| AD-22098-b1 | sense | cAGccAAcuuuucuAGAccdTsdT | 3520 | 1653 |
| | antis | GGUCuAGAAAAGUUGGCUGdTsdT | 3520 | 1654 |
| AD-22099-b1 | sense | AGccAAcuuuucuAGAccudTsdT | 3521 | 1655 |
| | antis | AGGUCuAGAAAAGUUGGCUdTsdT | 3521 | 1656 |
| AD-22100-b1 | sense | GccAAcuuuucuAGAccuGdTsdT | 3522 | 1657 |
| | antis | cAGGUCuAGAAAAGUUGGCdTsdT | 3522 | 1658 |
| AD-22101-b1 | sense | ccAAcuuuucuAGAccuGudTsdT | 3523 | 1659 |
| | antis | AcAGGUCuAGAAAAGUUGGdTsdT | 3523 | 1660 |
| AD-22102-b1 | sense | cAAcuuuucuAGAccuGuudTsdT | 3524 | 1661 |
| | antis | AAcAGGUCuAGAAAAGUUGdTsdT | 3524 | 1662 |
| AD-22103-b1 | sense | AAcuuuucuAGAccuGuuudTsdT | 3525 | 1663 |
| | antis | AAAcAGGUCuAGAAAAGUUdTsdT | 3525 | 1664 |
| AD-22104-b1 | sense | AcuuuucuAGAccuGuuuudTsdT | 3526 | 1665 |
| | antis | AAAAcAGGUCuAGAAAAGUdTsdT | 3526 | 1666 |
| AD-22105-b1 | sense | cuuuucuAGAccuGuuuuGdTsdT | 3527 | 1667 |
| | antis | cAAAAcAGGUCuAGAAAAGdTsdT | 3527 | 1668 |
| AD-22106-b1 | sense | uuuucuAGAccuGuuuuGcdTsdT | 3528 | 1669 |
| | antis | GcAAAAcAGGUCuAGAAAAdTsdT | 3528 | 1670 |
| AD-22107-b1 | sense | uuucuAGAccuGuuuuGcudTsdT | 3529 | 1671 |
| | antis | AGcAAAAcAGGUCuAGAAAdTsdT | 3529 | 1672 |
| AD-22108-b1 | sense | ucuAGAccuGuuuuGcuuudTsdT | 3531 | 1673 |
| | antis | AAAGcAAAAcAGGUCuAGAdTsdT | 3531 | 1674 |
| AD-22109-b1 | sense | cuAGAccuGuuuuGcuuuudTsdT | 3532 | 1675 |
| | antis | AAAAGcAAAAcAGGUCuAGdTsdT | 3532 | 1676 |
| AD-22110-b1 | sense | uAGAccuGuuuuGcuuuuGdTsdT | 3533 | 1677 |
| | antis | cAAAAGcAAAAcAGGUCuAdTsdT | 3533 | 1678 |
| AD-22111-b1 | sense | AGAccuGuuuuGcuuuuGudTsdT | 3534 | 1679 |
| | antis | AcAAAAGcAAAAcAGGUCUdTsdT | 3534 | 1680 |
| AD-22112-b1 | sense | GAccuGuuuuGcuuuuGuAdTsdT | 3535 | 1681 |
| | antis | uAcAAAAGcAAAAcAGGUCdTsdT | 3535 | 1682 |
| AD-22113-b1 | sense | AccuGuuuuGcuuuuGuAAdTsdT | 3536 | 1683 |
| | antis | UuAcAAAAGcAAAAcAGGUdTsdT | 3536 | 1684 |
| AD-22114-b1 | sense | ccuGuuuuGcuuuuGuAAcdTsdT | 3537 | 1685 |
| | antis | GUuAcAAAAGcAAAAcAGGdTsdT | 3537 | 1686 |
| AD-22115-b1 | sense | cuGuuuuGcuuuuGuAAcudTsdT | 3538 | 1687 |
| | antis | AGUuAcAAAAGcAAAAcAGdTsdT | 3538 | 1688 |
| | sense | uGuuuuGcuuuuGuAAcuudTsdT | 3539 | 1689 |
| | antis | AAGUuAcAAAAGcAAAAcAdTsdT | 3539 | 1690 |
| AD-22116-b1 | sense | GuuuuGcuuuuGuAAcuuGdTsdT | 3540 | 1691 |
| | antis | cAAGUuAcAAAAGcAAAACdTsdT | 3540 | 1692 |
| AD-22117-b1 | sense | uuuuGcuuuuGuAAcuuGAdTsdT | 3541 | 1693 |
| | antis | UcAAGUuAcAAAAGcAAAAdTsdT | 3541 | 1694 |
| AD-22118-b1 | sense | uuuGcuuuuGuAAcuuGAAdTsdT | 3542 | 1695 |
| | antis | UUcAAGUuAcAAAAGcAAAdTsdT | 3542 | 1696 |
| AD-22119-b1 | sense | uuGcuuuuGuAAcuuGAAGdTsdT | 3543 | 1697 |
| | antis | CUUcAAGUuAcAAAAGcAAdTsdT | 3543 | 1698 |
| AD-22120-b1 | sense | uGcuuuuGuAAcuuGAAGAdTsdT | 3544 | 1699 |
| | antis | UCUUcAAGUuAcAAAAGcAdTsdT | 3544 | 1700 |
| AD-22121-b1 | sense | GcuuuuGuAAcuuGAAGAudTsdT | 3545 | 1701 |
| | antis | AUCUUcAAGUuAcAAAAGCdTsdT | 3545 | 1702 |
| AD-22122-b1 | sense | cuuuuGuAAcuuGAAGAuAdTsdT | 3546 | 1703 |
| | antis | uAUCUUcAAGUuAcAAAAGdTsdT | 3546 | 1704 |
| AD-22123-b1 | sense | uuuuGuAAcuuGAAGAuAudTsdT | 3547 | 1705 |
| | antis | AuAUCUUcAAGUuAcAAAAdTsdT | 3547 | 1706 |
| AD-22124-b1 | sense | uuuGuAAcuuGAAGAuAuudTsdT | 3548 | 1707 |
| | antis | AAuAUCUUcAAGUuAcAAAdTsdT | 3548 | 1708 |
| AD-22125-b1 | sense | uuGuAAcuuGAAGAuAuuudTsdT | 3549 | 1709 |
| | antis | AAAuAUCUUcAAGUuAcAAdTsdT | 3549 | 1710 |
| AD-22126-b1 | sense | uGuAAcuuGAAGAuAuuuAdTsdT | 3550 | 1711 |
| | antis | uAAAuAUCUUcAAGUuAcAdTsdT | 3550 | 1712 |
| AD-22127-b1 | sense | GuAAcuuGAAGAuAuuuAudTsdT | 3551 | 1713 |
| | antis | AuAAAuAUCUUcAAGUuACdTsdT | 3551 | 1714 |
| AD-22128-b1 | sense | uAAcuuGAAGAuAuuuAuudTsdT | 3552 | 1715 |
| | antis | AAuAAAuAUCUUcAAGUuAdTsdT | 3552 | 1716 |
| AD-22129-b1 | sense | AAcuuGAAGAuAuuuAuucdTsdT | 3553 | 1717 |
| | antis | GAAuAAAuAUCUUcAAGUUdTsdT | 3553 | 1718 |
| AD-22130-b1 | sense | AcuuGAAGAuAuuuAuucudTsdT | 3554 | 1719 |
| | antis | AGAAuAAAuAUCUUcAAGUdTsdT | 3554 | 1720 |
| AD-22131-b1 | sense | cuuGAAGAuAuuuAuucuGdTsdT | 3555 | 1721 |
| | antis | cAGAAuAAAuAUCUUcAAGdTsdT | 3555 | 1722 |
| AD-22132-b1 | sense | uuGAAGAuAuuuAuucuGGdTsdT | 3556 | 1723 |
| | antis | CcAGAAuAAAuAUCUUcAAdTsdT | 3556 | 1724 |
| AD-22133-b1 | sense | uGAAGAuAuuuAuucuGGGdTsdT | 3557 | 1725 |
| | antis | CCcAGAAuAAAuAUCUUcAdTsdT | 3557 | 1726 |
| AD-22134-b1 | sense | GAAGAuAuuuAuucuGGGudTsdT | 3558 | 1727 |
| | antis | ACCcAGAAuAAAuAUCUUCdTsdT | 3558 | 1728 |

TABLE 9
Single dose treatment of HeLa cells with siRNA flanking AD-9680

| | % message | | % message | |
|---|---|---|---|---|
| | remaining | SD | remaining | |
| Duplex ID | 0.1 nM | 0.1 nM | 10 nM | SD 10 nM |
| AD-22098-b1 | 10.6 | 1.9 | 9.2 | 3.7 |
| AD-22098-b1 | 7.7 | 1.7 | 7.9 | 0.7 |
| AD-22099-b1 | 21.3 | 4.5 | 27.4 | 7.2 |
| AD-22099-b1 | 25.9 | 2.4 | 29.6 | 9.1 |
| AD-22100-b1 | 58.6 | 9.6 | 35.8 | 11.1 |
| AD-22100-b1 | 62.5 | 0.3 | 27.4 | 3.5 |
| AD-22101-b1 | 21.9 | 3.8 | 12.9 | 1.4 |
| AD-22101-b1 | 19.3 | 0.3 | 9.7 | 1.3 |
| AD-22102-b1 | 6.6 | 0.1 | 7.7 | 3.3 |
| AD-22103-b1 | 8.7 | 0.0 | 8.2 | 1.3 |
| AD-22104-b1 | 7.6 | 0.2 | 8.5 | 2.8 |
| AD-22105-b1 | 13.4 | 1.0 | 8.1 | 2.3 |
| AD-22106-b1 | 59.1 | 0.4 | 35.4 | 4.6 |
| AD-22107-b1 | 9.1 | 0.8 | 8.4 | 3.7 |
| AD-22108-b1 | 8.8 | 0.9 | 6.2 | 1.7 |
| AD-22109-b1 | 9.8 | 0.9 | 8.2 | 1.7 |
| AD-22110-b1 | 24.8 | 1.7 | 15.3 | 5.9 |
| AD-22111-b1 | 8.3 | 0.7 | 6.2 | 1.7 |
| AD-22112-b1 | 15.1 | 0.0 | 10.3 | 2.9 |
| AD-22113-b1 | 10.9 | 0.6 | 10.0 | 2.0 |
| AD-22114-b1 | 8.9 | 1.1 | 7.3 | 1.3 |
| AD-22115-b1 | 5.3 | 0.8 | 3.7 | 0.7 |
| AD-22116-b1 | 58.1 | 0.4 | 34.5 | 7.3 |
| AD-22117-b1 | 19.9 | 0.9 | 12.2 | 2.9 |
| AD-22118-b1 | 5.3 | 0.0 | 4.4 | 1.0 |
| AD-22119-b1 | 8.6 | 1.9 | 5.8 | 2.3 |
| AD-22120-b1 | 7.2 | 0.8 | 5.8 | 2.4 |
| AD-22121-b1 | 7.3 | 0.9 | 6.4 | 2.1 |
| AD-22122-b1 | 32.5 | 2.5 | 18.1 | 6.3 |
| AD-22123-b1 | 14.7 | 0.8 | 16.7 | 7.0 |
| AD-22124-b1 | 12.8 | 1.9 | 10.5 | 5.3 |
| AD-22125-b1 | 7.4 | 0.6 | 9.0 | 4.6 |
| AD-22126-b1 | 12.8 | 0.4 | 16.4 | 7.3 |
| AD-22127-b1 | 8.8 | 0.5 | 9.6 | 5.0 |
| AD-22128-b1 | 9.9 | 0.2 | 12.4 | 5.9 |
| AD-22129-b1 | 85.9 | 10.3 | 94.9 | 49.8 |
| AD-22130-b1 | 5.6 | 1.0 | 6.2 | 4.1 |
| AD-22131-b1 | 26.9 | 8.4 | 12.9 | 7.3 |
| AD-22132-b1 | 78.5 | 18.5 | 67.5 | 34.1 |
| AD-22133-b1 | 26.4 | 7.1 | 15.0 | 6.7 |
| AD-22134-b1 | 26.9 | 0.1 | 22.4 | 6.5 |
| AD-22169-b1 | 7.3 | 0.6 | 6.0 | 1.5 |
| AD-22169-b1 | 7.0 | 1.1 | 6.1 | 1.3 |
| AD-22170-b1 | 9.3 | 1.6 | 7.2 | 1.8 |
| AD-22170-b1 | 9.7 | 1.1 | 11.2 | 1.0 |
| AD-22171-b1 | 7.1 | 2.3 | 4.5 | 0.2 |
| AD-22171-b1 | 6.5 | 1.9 | 4.4 | 2.8 |
| AD-22172-b1 | 7.2 | 1.1 | 7.6 | 3.7 |
| AD-22172-b1 | 7.0 | 0.4 | 7.0 | 2.4 |
| AD-22173-b1 | 15.7 | 12.5 | 5.9 | 0.1 |
| AD-22174-b1 | 8.9 | 2.7 | 6.4 | 0.9 |
| AD-22175-b1 | 10.7 | 4.3 | 7.9 | 2.4 |
| AD-22176-b1 | 9.6 | 0.8 | 8.4 | 3.1 |
| AD-22177-b1 | 38.9 | 5.9 | 21.4 | 1.2 |
| AD-22178-b1 | 6.5 | 0.5 | 5.6 | 0.9 |
| AD-22179-b1 | 7.0 | 0.8 | 5.9 | 0.1 |
| AD-22180-b1 | 7.3 | 3.7 | 7.2 | 1.6 |
| AD-22181-b1 | 11.1 | 0.9 | 10.0 | 1.0 |
| AD-22182-b1 | 5.4 | 1.4 | 4.0 | 1.5 |
| AD-22183-b1 | 3.8 | 0.4 | 2.9 | 0.4 |
| AD-22184-b1 | 5.1 | 0.2 | 3.7 | 0.7 |
| AD-22185-b1 | 5.7 | 0.6 | 5.0 | 1.5 |
| AD-22186-b1 | 5.3 | 0.3 | 5.7 | 1.0 |
| AD-22187-b1 | 5.3 | 1.2 | 5.3 | 1.4 |
| AD-22188-b1 | 12.6 | 2.6 | 11.6 | 0.2 |
| AD-22189-b1 | 5.2 | 0.5 | 4.5 | 1.8 |
| AD-22190-b1 | 4.7 | 1.3 | 3.4 | 1.1 |
| AD-22191-b1 | 10.5 | 0.6 | 7.9 | 0.9 |
| AD-22192-b1 | 6.9 | 2.2 | 5.8 | 3.5 |
| AD-22193-b1 | 7.5 | 1.5 | 5.2 | 0.6 |
| AD-22194-b1 | 8.0 | 1.4 | 6.5 | 1.9 |
| AD-22195-b1 | 7.0 | 1.9 | 4.9 | 2.3 |
| AD-22196-b1 | 5.4 | 0.0 | 3.8 | 0.9 |
| AD-22197-b1 | 6.6 | 0.4 | 5.2 | 1.2 |
| AD-22198-b1 | 7.3 | 0.8 | 8.5 | 2.4 |
| AD-22199-b1 | 5.5 | 0.7 | 4.2 | 1.2 |
| AD-22200-b1 | 11.0 | 0.5 | 12.5 | 3.1 |
| AD-22201-b1 | 44.0 | 3.1 | 47.3 | 8.3 |
| AD-22202-b1 | 9.0 | 1.2 | 7.2 | 0.9 |
| AD-22203-b1 | 12.5 | 0.0 | 12.7 | 2.2 |
| AD-22204-b1 | 57.1 | 5.2 | 50.2 | 10.2 |
| AD-22205-b1 | 27.0 | 0.4 | 24.5 | 0.0 |
| AD-22206-b1 | 13.9 | 1.1 | 11.4 | 1.3 |
| AD-9680 | 7.1 | ND | 9.3 | ND |

TABLE 10
IC50 in HeLa cells using siRNA flanking AD-9680

| | Rep1 | Rep2 | |
|---|---|---|---|
| | IC50 | IC50 | Average IC50 |
| Duplex Name | (pM) | (pM) | (pM) |
| AD-22098 | 6.0 | 6.7 | 6.4 |
| AD-22099 | 25.0 | 37.8 | 31.4 |
| AD-22101 | 66.5 | 81.9 | 74.2 |
| AD-22102 | 2.3 | 1.5 | 1.9 |
| AD-22103 | 6.3 | 1.2 | 3.8 |
| AD-22104 | 2.2 | 1.4 | 1.8 |
| AD-22105 | 13.3 | 0.1 | 6.7 |
| AD-22107 | 2.2 | 0.9 | 1.6 |
| AD-22108 | 2.3 | 2.0 | 2.1 |
| AD-22109 | 5.5 | 6.3 | 5.9 |
| AD-22110 | 59.1 | 42.2 | 50.7 |
| AD-22111 | 9.1 | 8.2 | 8.7 |
| AD-22112 | 25.8 | 31.0 | 28.4 |
| AD-22113 | 4.2 | 4.4 | 4.3 |
| AD-22114 | 6.9 | 4.0 | 5.5 |
| AD-22115 | 3.0 | 2.2 | 2.6 |
| AD-22117 | 56.0 | 37.6 | 46.8 |
| AD-22118 | 2.9 | 1.7 | 2.3 |
| AD-22119 | 6.7 | 0.0 | 3.4 |
| AD-22120 | 2.0 | 1.2 | 1.6 |
| AD-22121 | 2.1 | 4.1 | 3.1 |
| AD-22122 | 203.3 | 156.3 | 179.8 |
| AD-22123 | 33.1 | 50.7 | 41.9 |
| AD-22124 | 18.8 | 13.1 | 15.9 |
| AD-22125 | 3.3 | 2.6 | 3.0 |
| AD-22126 | 17.9 | 18.5 | 18.2 |
| AD-22127 | 11.1 | 4.3 | 7.7 |
| AD-22128 | 14.6 | 3.3 | 8.9 |
| AD-22130 | 1.7 | 0.3 | 1.0 |
| AD-22131 | 172.5 | 59.6 | 116.0 |
| AD-22133 | 94.6 | 57.2 | 75.9 |
| AD-22134 | 113.0 | 81.3 | 97.2 |
| AD-9680 | 3.8 | 2.4 | 3.1 |

The application's sequence listing, which the Patent Office published only in electronic form, follows.

SEQUENCE LISTING (1730 sequences)

SEQ ID NO: 1 - DNA, 21 bp, Artificial Sequence
  Description of Artificial Sequence: Synthetic oligonucleotide
  Description of Combined DNA/RNA Molecule: Synthetic oligonucleotide
agcgacgucgaggcgcucatt

SEQ ID NO: 2 - DNA, 21 bp, Artificial Sequence
  Description of Artificial Sequence: Synthetic oligonucleotide
  Description of Combined DNA/RNA Molecule: Synthetic oligonucleotide
ugagcgccucgacgucgcutt

SEQ ID NO: 3 - DNA, 21 bp, Artificial Sequence
  Description of Artificial Sequence: Synthetic oligonucleotide
  Description of Combined DNA/RNA Molecule: Synthetic oligonucleotide
cgcucaugguugcaggcggtt

SEQ ID NO: 4 - DNA, 21 bp, Artificial Sequence
  Description of Artificial Sequence: Synthetic oligonucleotide
  Description of Combined DNA/RNA Molecule: Synthetic oligonucleotide
ccgccugcaaccaugagcgtt

SEQ ID NO: 5 - DNA, 21 bp, Artificial Sequence
  Description of Artificial Sequence: Synthetic oligonucleotide
  Description of Combined DNA/RNA Molecule: Synthetic oligonucleotide
gcucaugguugcaggcgggtt

SEQ ID NO: 6 - DNA, 21 bp, Artificial Sequence
  Description of Artificial Sequence: Synthetic oligonucleotide
  Description of Combined DNA/RNA Molecule: Synthetic oligonucleotide
cccgccugcaaccaugagctt

SEQ ID NO: 7 - DNA, 21 bp, Artificial Sequence
  Description of Artificial Sequence: Synthetic oligonucleotide
  Description of Combined DNA/RNA Molecule: Synthetic oligonucleotide
gcgggcgccgccguucagutt

SEQ ID NO: 8 - DNA, 21 bp, Artificial Sequence
  Description of Artificial Sequence: Synthetic oligonucleotide
  Description of Combined DNA/RNA Molecule: Synthetic oligonucleotide
acugaacggcggcgcccgctt

SEQ ID NO: 9 - DNA, 21 bp, Artificial Sequence
  Description of Artificial Sequence: Synthetic oligonucleotide
  Description of Combined DNA/RNA Molecule: Synthetic oligonucleotide
cgggcgccgccguucaguutt

SEQ ID NO: 10 - DNA, 21 bp, Artificial Sequence
  Description of Artificial Sequence: Synthetic oligonucleotide
  Description of Combined DNA/RNA Molecule: Synthetic oligonucleotide
aacugaacggcggcgcccgtt

SEQ ID NO: 11 - DNA, 21 bp, Artificial Sequence
  Description of Artificial Sequence: Synthetic oligonucleotide
  Description of Combined DNA/RNA Molecule: Synthetic oligonucleotide
gggcgccgccguucaguuctt

SEQ ID NO: 12 - DNA, 21 bp, Artificial Sequence
  Description of Artificial Sequence: Synthetic oligonucleotide
  Description of Combined DNA/RNA Molecule: Synthetic oligonucleotide
gaacugaacggcggcgccctt

SEQ ID NO: 13 - DNA, 21 bp, Artificial Sequence
  Description of Artificial Sequence: Synthetic oligonucleotide
  Description of Combined DNA/RNA Molecule: Synthetic oligonucleotide
ccguucaguucagggucugtt

SEQ ID NO: 14 - DNA, 21 bp, Artificial Sequence
  Description of Artificial Sequence: Synthetic oligonucleotide
  Description of Combined DNA/RNA Molecule: Synthetic oligonucleotide
cagacccugaacugaacggtt

SEQ ID NO: 15 - DNA, 21 bp, Artificial Sequence
  Description of Artificial Sequence: Synthetic oligonucleotide
  Description of Combined DNA/RNA Molecule: Synthetic oligonucleotide
uucaguucagggucugagctt

SEQ ID NO: 16 - DNA, 21 bp, Artificial Sequence
  Description of Artificial Sequence: Synthetic oligonucleotide
  Description of Combined DNA/RNA Molecule: Synthetic oligonucleotide
gcucagacccugaacugaatt

SEQ ID NO: 17 - DNA, 21 bp, Artificial Sequence
  Description of Artificial Sequence: Synthetic oligonucleotide
  Description of Combined DNA/RNA Molecule: Synthetic oligonucleotide
gugagacuggcucgggcggtt

SEQ ID NO: 18 - DNA, 21 bp, Artificial Sequence
  Description of Artificial Sequence: Synthetic oligonucleotide
  Description of Combined DNA/RNA Molecule: Synthetic oligonucleotide
ccgcccgagccagucucactt

SEQ ID NO: 19 - DNA, 21 bp, Artificial Sequence
  Description of Artificial Sequence: Synthetic oligonucleotide
  Description of Combined DNA/RNA Molecule: Synthetic oligonucleotide
ggccgggacgcgucguugctt

SEQ ID NO: 20 - DNA, 21 bp, Artificial Sequence
  Description of Artificial Sequence: Synthetic oligonucleotide
  Description of Combined DNA/RNA Molecule: Synthetic oligonucleotide
gcaacgacgcgucccggcctt

SEQ ID NO: 21 - DNA, 21 bp, Artificial Sequence
  Description of Artificial Sequence: Synthetic oligonucleotide
  Description of Combined DNA/RNA Molecule: Synthetic oligonucleotide
gccgggacgcgucguugcatt

SEQ ID NO: 22 - DNA, 21 bp, Artificial Sequence
  Description of Artificial Sequence: Synthetic oligonucleotide
  Description of Combined DNA/RNA Molecule: Synthetic oligonucleotide
ugcaacgacgcgucccggctt

SEQ ID NO: 23 - DNA, 21 bp, Artificial Sequence
  Description of Artificial Sequence: Synthetic oligonucleotide
  Description of Combined DNA/RNA Molecule: Synthetic oligonucleotide
ccgggacgcgucguugcagtt

SEQ ID NO: 24 - DNA, 21 bp, Artificial Sequence
  Description of Artificial Sequence: Synthetic oligonucleotide
  Description of Combined DNA/RNA Molecule: Synthetic oligonucleotide
cugcaacgacgcgucccggtt

SEQ ID NO: 25 - DNA, 21 bp, Artificial Sequence
  Description of Artificial Sequence: Synthetic oligonucleotide
  Description of Combined DNA/RNA Molecule: Synthetic oligonucleotide
ggacgcgucguugcagcagtt

SEQ ID NO: 26 - DNA, 21 bp, Artificial Sequence
  Description of Artificial Sequence: Synthetic oligonucleotide
  Description of Combined DNA/RNA Molecule: Synthetic oligonucleotide
cugcugcaacgacgcgucctt

SEQ ID NO: 27 - DNA, 21 bp, Artificial Sequence
  Description of Artificial Sequence: Synthetic oligonucleotide
  Description of Combined DNA/RNA Molecule: Synthetic oligonucleotide
ucccagccaggauuccgcgtt

SEQ ID NO: 28 - DNA, 21 bp, Artificial Sequence
  Description of Artificial Sequence: Synthetic oligonucleotide
  Description of Combined DNA/RNA Molecule: Synthetic oligonucleotide
cgcggaauccuggcugggatt

SEQ ID NO: 29 - DNA, 21 bp, Artificial Sequence
  Description of Artificial Sequence: Synthetic oligonucleotide
  Description of Combined DNA/RNA Molecule: Synthetic oligonucleotide
ucccagccaggauuccgcgtt

SEQ ID NO: 30 - DNA, 21 bp, Artificial Sequence
  Description of Artificial Sequence: Synthetic oligonucleotide
  Description of Combined DNA/RNA Molecule: Synthetic oligonucleotide
cgcggaauccuggcugggatt

SEQ ID NO: 31 - DNA, 21 bp, Artificial Sequence
  Description of Artificial Sequence: Synthetic oligonucleotide
  Description of Combined DNA/RNA Molecule: Synthetic oligonucleotide
cccagccaggauuccgcgctt

SEQ ID NO: 32 - DNA, 21 bp, Artificial Sequence
  Description of Artificial Sequence: Synthetic oligonucleotide
  Description of Combined DNA/RNA Molecule: Synthetic oligonucleotide
gcgcggaauccuggcugggtt

SEQ ID NO: 33 - DNA, 21 bp, Artificial Sequence
  Description of Artificial Sequence: Synthetic oligonucleotide
  Description of Combined DNA/RNA Molecule: Synthetic oligonucleotide
cccagccaggauuccgcgctt

SEQ ID NO: 34 - DNA, 21 bp, Artificial Sequence
  Description of Artificial Sequence: Synthetic oligonucleotide
  Description of Combined DNA/RNA Molecule: Synthetic oligonucleotide
gcgcggaauccuggcugggtt

SEQ ID NO: 35 - DNA, 21 bp, Artificial Sequence
  Description of Artificial Sequence: Synthetic oligonucleotide
  Description of Combined DNA/RNA Molecule: Synthetic oligonucleotide
cagccaggauuccgcgcgctt

SEQ ID NO: 36 - DNA, 21 bp, Artificial Sequence
  Description of Artificial Sequence: Synthetic oligonucleotide
  Description of Combined DNA/RNA Molecule: Synthetic oligonucleotide
gcgcgcggaauccuggcugtt

SEQ ID NO: 37 - DNA, 21 bp, Artificial Sequence
  Description of Artificial Sequence: Synthetic oligonucleotide
  Description of Combined DNA/RNA Molecule: Synthetic oligonucleotide
cagccaggauuccgcgcgctt

SEQ ID NO: 38 - DNA, 21 bp, Artificial Sequence
  Description of Artificial Sequence: Synthetic oligonucleotide
  Description of Combined DNA/RNA Molecule: Synthetic oligonucleotide
gcgcgcggaauccuggcugtt

SEQ ID NO: 39 - DNA, 21 bp, Artificial Sequence
  Description of Artificial Sequence: Synthetic oligonucleotide
  Description of Combined DNA/RNA Molecule: Synthetic oligonucleotide
agcuccugcacaguccucctt

SEQ ID NO: 40 - DNA, 21 bp, Artificial Sequence
  Description of Artificial Sequence: Synthetic oligonucleotide
  Description of Combined DNA/RNA Molecule: Synthetic oligonucleotide
ggaggacugugcaggagcutt

SEQ ID NO: 41 - DNA, 21 bp, Artificial Sequence
  Description of Artificial Sequence: Synthetic oligonucleotide
  Description of Combined DNA/RNA Molecule: Synthetic oligonucleotide
agcuccugcacaguccucctt

SEQ ID NO: 42 - DNA, 21 bp, Artificial Sequence
  Description of Artificial Sequence: Synthetic oligonucleotide
  Description of Combined DNA/RNA Molecule: Synthetic oligonucleotide
ggaggacugugcaggagcutt

SEQ ID NO: 43 - DNA, 21 bp, Artificial Sequence
  Description of Artificial Sequence: Synthetic oligonucleotide
  Description of Combined DNA/RNA Molecule: Synthetic oligonucleotide
caccgcaaggcucaaggcgtt

SEQ ID NO: 44 - DNA, 21 bp, Artificial Sequence
  Description of Artificial Sequence: Synthetic oligonucleotide
  Description of Combined DNA/RNA Molecule: Synthetic oligonucleotide
cgccuugagccuugcggugtt

SEQ ID NO: 45 - DNA, 21 bp, Artificial Sequence
  Description of Artificial Sequence: Synthetic oligonucleotide
  Description of Combined DNA/RNA Molecule: Synthetic oligonucleotide
cgcaaggcucaaggcgccgtt

SEQ ID NO: 46 - DNA, 21 bp, Artificial Sequence
  Description of Artificial Sequence: Synthetic oligonucleotide
  Description of Combined DNA/RNA Molecule: Synthetic oligonucleotide
cggcgccuugagccuugcgtt

SEQ ID NO: 47 - DNA, 21 bp, Artificial Sequence
  Description of Artificial Sequence: Synthetic oligonucleotide
  Description of Combined DNA/RNA Molecule: Synthetic oligonucleotide
caaggcucaaggcgccgcctt

SEQ ID NO: 48 - DNA, 21 bp, Artificial Sequence
  Description of Artificial Sequence: Synthetic oligonucleotide
  Description of Combined DNA/RNA Molecule: Synthetic oligonucleotide
ggcggcgccuugagccuugtt

SEQ ID NO: 49 - DNA, 21 bp, Artificial Sequence
  Description of Artificial Sequence: Synthetic oligonucleotide
  Description of Combined DNA/RNA Molecule: Synthetic oligonucleotide
guggaccgcgcacggccuctt

SEQ ID NO: 50 - DNA, 21 bp, Artificial Sequence
  Description of Artificial Sequence: Synthetic oligonucleotide
  Description of Combined DNA/RNA Molecule: Synthetic oligonucleotide
gaggccgugcgcgguccactt

SEQ ID NO: 51 - DNA, 21 bp, Artificial Sequence
  Description of Artificial Sequence: Synthetic oligonucleotide
  Description of Combined DNA/RNA Molecule: Synthetic oligonucleotide
uggaccgcgcacggccucutt

SEQ ID NO: 52 - DNA, 21 bp, Artificial Sequence
  Description of Artificial Sequence: Synthetic oligonucleotide
  Description of Combined DNA/RNA Molecule: Synthetic oligonucleotide
agaggccgugcgcgguccatt

SEQ ID NO: 53 - DNA, 21 bp, Artificial Sequence
  Description of Artificial Sequence: Synthetic oligonucleotide
  Description of Combined DNA/RNA Molecule: Synthetic oligonucleotide
ggaccgcgcacggccucuatt

SEQ ID NO: 54 - DNA, 21 bp, Artificial Sequence
  Description of Artificial Sequence: Synthetic oligonucleotide
  Description of Combined DNA/RNA Molecule: Synthetic oligonucleotide
uagaggccgugcgcggucctt

SEQ ID NO: 55 - DNA, 21 bp, Artificial Sequence
  Description of Artificial Sequence: Synthetic oligonucleotide
  Description of Combined DNA/RNA Molecule: Synthetic oligonucleotide
gaccgcgcacggccucuagtt

SEQ ID NO: 56 - DNA, 21 bp, Artificial Sequence
  Description of Artificial Sequence: Synthetic oligonucleotide
  Description of Combined DNA/RNA Molecule: Synthetic oligonucleotide
cuagaggccgugcgcgguctt

SEQ ID NO: 57 - DNA, 21 bp, Artificial Sequence
  Description of Artificial Sequence: Synthetic oligonucleotide
  Description of Combined DNA/RNA Molecule: Synthetic oligonucleotide
accgcgcacggccucuaggtt

SEQ ID NO: 58 - DNA, 21 bp, Artificial Sequence
  Description of Artificial Sequence: Synthetic oligonucleotide
  Description of Combined DNA/RNA Molecule: Synthetic oligonucleotide
ccuagaggccgugcgcggutt

SEQ ID NO: 59 - DNA, 21 bp, Artificial Sequence
  Description of Artificial Sequence: Synthetic oligonucleotide
  Description of Combined DNA/RNA Molecule: Synthetic oligonucleotide
ccgcgcacggccucuaggutt

SEQ ID NO: 60 - DNA, 21 bp, Artificial Sequence
  Description of Artificial Sequence: Synthetic oligonucleotide
  Description of Combined DNA/RNA Molecule: Synthetic oligonucleotide
accuagaggccgugcgcggtt

SEQ ID NO: 61 - DNA, 21 bp, Artificial Sequence
  Description of Artificial Sequence: Synthetic oligonucleotide
  Description of Combined DNA/RNA Molecule: Synthetic oligonucleotide
cgcgcacggccucuagguctt

SEQ ID NO: 62 - DNA, 21 bp, Artificial Sequence
  Description of Artificial Sequence: Synthetic oligonucleotide
  Description of Combined DNA/RNA Molecule: Synthetic oligonucleotide
gaccuagaggccgugcgcgtt

SEQ ID NO: 63 - DNA, 21 bp, Artificial Sequence
  Description of Artificial Sequence: Synthetic oligonucleotide
  Description of Combined DNA/RNA Molecule: Synthetic oligonucleotide
gcgcacggccucuaggucutt

SEQ ID NO: 64 - DNA, 21 bp, Artificial Sequence
  Description of Artificial Sequence: Synthetic oligonucleotide
  Description of Combined DNA/RNA Molecule: Synthetic oligonucleotide
agaccuagaggccgugcgctt

SEQ ID NO: 65 - DNA, 21 bp, Artificial Sequence
  Description of Artificial Sequence: Synthetic oligonucleotide
  Description of Combined DNA/RNA Molecule: Synthetic oligonucleotide
cgcacggccucuaggucuctt

SEQ ID NO: 66 - DNA, 21 bp, Artificial Sequence
  Description of Artificial Sequence: Synthetic oligonucleotide
  Description of Combined DNA/RNA Molecule: Synthetic oligonucleotide
gagaccuagaggccgugcgtt

SEQ ID NO: 67 - DNA, 21 bp, Artificial Sequence
  Description of Artificial Sequence: Synthetic oligonucleotide
  Description of Combined DNA/RNA Molecule: Synthetic oligonucleotide
cucuaggucuccucgccagtt

SEQ ID NO: 68 - DNA, 21 bp, Artificial Sequence
  Description of Artificial Sequence: Synthetic oligonucleotide
  Description of Combined DNA/RNA Molecule: Synthetic oligonucleotide
cuggcgaggagaccuagagtt

SEQ ID NO: 69 - DNA, 21 bp, Artificial Sequence
  Description of Artificial Sequence: Synthetic oligonucleotide
  Description of Combined DNA/RNA Molecule: Synthetic oligonucleotide
ucuaggucuccucgccaggtt

SEQ ID NO: 70 - DNA, 21 bp, Artificial Sequence
  Description of Artificial Sequence: Synthetic oligonucleotide
  Description of Combined DNA/RNA Molecule: Synthetic oligonucleotide
ccuggcgaggagaccuagatt

SEQ ID NO: 71 - DNA, 21 bp, Artificial Sequence
  Description of Artificial Sequence: Synthetic oligonucleotide
  Description of Combined DNA/RNA Molecule: Synthetic oligonucleotide
cuaggucuccucgccaggatt

SEQ ID NO: 72 - DNA, 21 bp, Artificial Sequence
  Description of Artificial Sequence: Synthetic oligonucleotide
  Description of Combined DNA/RNA Molecule: Synthetic oligonucleotide
uccuggcgaggagaccuagtt

SEQ ID NO: 73 - DNA, 21 bp, Artificial Sequence
  Description of Artificial Sequence: Synthetic oligonucleotide
  Description of Combined DNA/RNA Molecule: Synthetic oligonucleotide
aggucuccucgccaggacatt

SEQ ID NO: 74 - DNA, 21 bp, Artificial Sequence
  Description of Artificial Sequence: Synthetic oligonucleotide
  Description of Combined DNA/RNA Molecule: Synthetic oligonucleotide
uguccuggcgaggagaccutt

SEQ ID NO: 75 - DNA, 21 bp, Artificial Sequence
  Description of Artificial Sequence: Synthetic oligonucleotide
  Description of Combined DNA/RNA Molecule: Synthetic oligonucleotide
ccucgccaggacagcaacctt

SEQ ID NO: 76 - DNA, 21 bp, Artificial Sequence
  Description of Artificial Sequence: Synthetic oligonucleotide
  Description of Combined DNA/RNA Molecule: Synthetic oligonucleotide
gguugcuguccuggcgaggtt

SEQ ID NO: 77 - DNA, 21 bp, Artificial Sequence
  Description of Artificial Sequence: Synthetic oligonucleotide
  Description of Combined DNA/RNA Molecule: Synthetic oligonucleotide
cgucagcuccaggcggucctt

SEQ ID NO: 78 - DNA, 21 bp, Artificial Sequence
  Description of Artificial Sequence: Synthetic oligonucleotide
  Description of Combined DNA/RNA Molecule: Synthetic oligonucleotide
ggaccgccuggagcugacgtt

SEQ ID NO: 79 - DNA, 21 bp, Artificial Sequence
  Description of Artificial Sequence: Synthetic oligonucleotide
  Description of Combined DNA/RNA Molecule: Synthetic oligonucleotide
cgucagcuccaggcggucctt

SEQ ID NO: 80 - DNA, 21 bp, Artificial Sequence
  Description of Artificial Sequence: Synthetic oligonucleotide
  Description of Combined DNA/RNA Molecule: Synthetic oligonucleotide
ggaccgccuggagcugacgtt

SEQ ID NO: 81 - DNA, 21 bp, Artificial Sequence
  Description of Artificial Sequence: Synthetic oligonucleotide
  Description of Combined DNA/RNA Molecule: Synthetic oligonucleotide
gucagcuccaggcgguccutt

SEQ ID NO: 82 - DNA, 21 bp, Artificial Sequence
  Description of Artificial Sequence: Synthetic oligonucleotide
  Description of Combined DNA/RNA Molecule: Synthetic oligonucleotide
aggaccgccuggagcugactt

SEQ ID NO: 83 - DNA, 21 bp, Artificial Sequence
  Description of Artificial Sequence: Synthetic oligonucleotide
  Description of Combined DNA/RNA Molecule: Synthetic oligonucleotide
gucagcuccaggcgguccutt

SEQ ID NO: 84 - DNA, 21 bp, Artificial Sequence
  Description of Artificial Sequence: Synthetic oligonucleotide
  Description of Combined DNA/RNA Molecule: Synthetic oligonucleotide
aggaccgccuggagcugactt

SEQ ID NO: 85 - DNA, 21 bp, Artificial Sequence
  Description of Artificial Sequence: Synthetic oligonucleotide
  Description of Combined DNA/RNA Molecule: Synthetic oligonucleotide
ggcgcccgugcgcaggaggtt

SEQ ID NO: 86 - DNA, 21 bp, Artificial Sequence
  Description of Artificial Sequence: Synthetic oligonucleotide
  Description of Combined DNA/RNA Molecule: Synthetic oligonucleotide
ccuccugcgcacgggcgcctt

SEQ ID NO: 87 - DNA, 21 bp, Artificial Sequence
  Description of Artificial Sequence: Synthetic oligonucleotide
  Description of Combined DNA/RNA Molecule: Synthetic oligonucleotide
ggagcuggugcuagccuugtt

SEQ ID NO: 88 - DNA, 21 bp, Artificial Sequence
  Description of Artificial Sequence: Synthetic oligonucleotide
  Description of Combined DNA/RNA Molecule: Synthetic oligonucleotide
caaggcuagcaccagcucctt

SEQ ID NO: 89 - DNA, 21 bp, Artificial Sequence
  Description of Artificial Sequence: Synthetic oligonucleotide
  Description of Combined DNA/RNA Molecule: Synthetic oligonucleotide
ggagcuggugcuagccuugtt

SEQ ID NO: 90 - DNA, 21 bp, Artificial Sequence
  Description of Artificial Sequence: Synthetic oligonucleotide
  Description of Combined DNA/RNA Molecule: Synthetic oligonucleotide
caaggcuagcaccagcucctt

SEQ ID NO: 91 - DNA, 21 bp, Artificial Sequence
  Description of Artificial Sequence: Synthetic oligonucleotide
  Description of Combined DNA/RNA Molecule: Synthetic oligonucleotide
gcuggugcuagccuugcgutt

SEQ ID NO: 92 - DNA, 21 bp, Artificial Sequence
  Description of Artificial Sequence: Synthetic oligonucleotide
  Description of Combined DNA/RNA Molecule: Synthetic oligonucleotide
acgcaaggcuagcaccagctt

SEQ ID NO: 93 - DNA, 21 bp, Artificial Sequence
  Description of Artificial Sequence: Synthetic oligonucleotide
  Description of Combined DNA/RNA Molecule: Synthetic oligonucleotide
gcuggugcuagccuugcgutt

SEQ ID NO: 94 - DNA, 21 bp, Artificial Sequence
  Description of Artificial Sequence: Synthetic oligonucleotide
  Description of Combined DNA/RNA Molecule: Synthetic oligonucleotide
acgcaaggcuagcaccagctt

SEQ ID NO: 95 - DNA, 21 bp, Artificial Sequence
  Description of Artificial Sequence: Synthetic oligonucleotide
  Description of Combined DNA/RNA Molecule: Synthetic oligonucleotide
cuggugcuagccuugcguutt

SEQ ID NO: 96 - DNA, 21 bp, Artificial Sequence
  Description of Artificial Sequence: Synthetic oligonucleotide
  Description of Combined DNA/RNA Molecule: Synthetic oligonucleotide
aacgcaaggcuagcaccagtt

SEQ ID NO: 97 - DNA, 21 bp, Artificial Sequence
  Description of Artificial Sequence: Synthetic oligonucleotide
  Description of Combined DNA/RNA Molecule: Synthetic oligonucleotide
cuggugcuagccuugcguutt

SEQ ID NO: 98 - DNA, 21 bp, Artificial Sequence
  Description of Artificial Sequence: Synthetic oligonucleotide
  Description of Combined DNA/RNA Molecule: Synthetic oligonucleotide
aacgcaaggcuagcaccagtt

SEQ ID NO: 99 - DNA, 21 bp, Artificial Sequence
  Description of Artificial Sequence: Synthetic oligonucleotide
  Description of Combined DNA/RNA Molecule: Synthetic oligonucleotide
cuggugcuagccuugcguutt

SEQ ID NO: 100 - DNA, 21 bp, Artificial Sequence
  Description of Artificial Sequence: Synthetic oligonucleotide
  Description of Combined DNA/RNA Molecule: Synthetic oligonucleotide
aacgcaaggcuagcaccagtt

SEQ ID NO: 101 - DNA, 21 bp, Artificial Sequence
  Description of Artificial Sequence: Synthetic oligonucleotide
  Description of Combined DNA/RNA Molecule: Synthetic oligonucleotide
ugcuagccuugcguuccgatt

SEQ ID NO: 102 - DNA, 21 bp, Artificial Sequence
  Description of Artificial Sequence: Synthetic oligonucleotide
  Description of Combined DNA/RNA Molecule: Synthetic oligonucleotide
ucggaacgcaaggcuagcatt

SEQ ID NO: 103 - DNA, 21 bp, Artificial Sequence
  Description of Artificial Sequence: Synthetic oligonucleotide
  Description of Combined DNA/RNA Molecule: Synthetic oligonucleotide
ugcuagccuugcguuccgatt

SEQ ID NO: 104 - DNA, 21 bp, Artificial Sequence
  Description of Artificial Sequence: Synthetic oligonucleotide
  Description of Combined DNA/RNA Molecule: Synthetic oligonucleotide
ucggaacgcaaggcuagcatt

SEQ ID NO: 105 - DNA, 21 bp, Artificial Sequence
  Description of Artificial Sequence: Synthetic oligonucleotide
  Description of Combined DNA/RNA Molecule: Synthetic oligonucleotide
uagccuugcguuccgaggatt

SEQ ID NO: 106 - DNA, 21 bp, Artificial Sequence
  Description of Artificial Sequence: Synthetic oligonucleotide
  Description of Combined DNA/RNA Molecule: Synthetic oligonucleotide
uccucggaacgcaaggcuatt

SEQ ID NO: 107 - DNA, 21 bp, Artificial Sequence
  Description of Artificial Sequence: Synthetic oligonucleotide
  Description of Combined DNA/RNA Molecule: Synthetic oligonucleotide
uagccuugcguuccgaggatt

SEQ ID NO: 108 - DNA, 21 bp, Artificial Sequence
  Description of Artificial Sequence: Synthetic oligonucleotide
  Description of Combined DNA/RNA Molecule: Synthetic oligonucleotide
uccucggaacgcaaggcuatt

SEQ ID NO: 109 - DNA, 21 bp, Artificial Sequence
  Description of Artificial Sequence: Synthetic oligonucleotide
  Description of Combined DNA/RNA Molecule: Synthetic oligonucleotide
gacggccuggccgaagcactt

SEQ ID NO: 110 - DNA, 21 bp, Artificial Sequence
  Description of Artificial Sequence: Synthetic oligonucleotide
  Description of Combined DNA/RNA Molecule: Synthetic oligonucleotide
gugcuucggccaggccguctt

SEQ ID NO: 111 - DNA, 21 bp, Artificial Sequence
  Description of Artificial Sequence: Synthetic oligonucleotide
  Description of Combined DNA/RNA Molecule: Synthetic oligonucleotide
ggccgaagcacccgagcactt

SEQ ID NO: 112 - DNA, 21 bp, Artificial Sequence
  Description of Artificial Sequence: Synthetic oligonucleotide
  Description of Combined DNA/RNA Molecule: Synthetic oligonucleotide
gugcucgggugcuucggcctt

SEQ ID NO: 113 - DNA, 21 bp, Artificial Sequence
  Description of Artificial Sequence: Synthetic oligonucleotide
  Description of Combined DNA/RNA Molecule: Synthetic oligonucleotide
gccgaagcacccgagcacgtt

SEQ ID NO: 114 - DNA, 21 bp, Artificial Sequence
  Description of Artificial Sequence: Synthetic oligonucleotide
  Description of Combined DNA/RNA Molecule: Synthetic oligonucleotide
cgugcucgggugcuucggctt

SEQ ID NO: 115 - DNA, 21 bp, Artificial Sequence
  Description of Artificial Sequence: Synthetic oligonucleotide
  Description of Combined DNA/RNA Molecule: Synthetic oligonucleotide
ccgaagcacccgagcacggtt

SEQ ID NO: 116 - DNA, 21 bp, Artificial Sequence
  Description of Artificial Sequence: Synthetic oligonucleotide
  Description of Combined DNA/RNA Molecule: Synthetic oligonucleotide
ccgugcucgggugcuucggtt

SEQ ID NO: 117 - DNA, 21 bp, Artificial Sequence
  Description of Artificial Sequence: Synthetic oligonucleotide
  Description of Combined DNA/RNA Molecule: Synthetic oligonucleotide
ccgagcacggaaccacagctt

SEQ ID NO: 118 - DNA, 21 bp, Artificial Sequence
  Description of Artificial Sequence: Synthetic oligonucleotide
  Description of Combined DNA/RNA Molecule: Synthetic oligonucleotide
gcugugguuccgugcucggtt

SEQ ID NO: 119 - DNA, 21 bp, Artificial Sequence
  Description of Artificial Sequence: Synthetic oligonucleotide
  Description of Combined DNA/RNA Molecule: Synthetic oligonucleotide
caccgcugcgccaaggauctt

SEQ ID NO: 120 - DNA, 21 bp, Artificial Sequence
  Description of Artificial Sequence: Synthetic oligonucleotide
  Description of Combined DNA/RNA Molecule: Synthetic oligonucleotide
gauccuuggcgcagcggugtt

SEQ ID NO: 121 - DNA, 21 bp, Artificial Sequence
  Description of Artificial Sequence: Synthetic oligonucleotide
  Description of Combined DNA/RNA Molecule: Synthetic oligonucleotide
ccgcugcgccaaggauccgtt

SEQ ID NO: 122 - DNA, 21 bp, Artificial Sequence
  Description of Artificial Sequence: Synthetic oligonucleotide
  Description of Combined DNA/RNA Molecule: Synthetic oligonucleotide
cggauccuuggcgcagcggtt

SEQ ID NO: 123 - DNA, 21 bp, Artificial Sequence
  Description of Artificial Sequence: Synthetic oligonucleotide
  Description of Combined DNA/RNA Molecule: Synthetic oligonucleotide
cgcugcgccaaggauccgutt

SEQ ID NO: 124 - DNA, 21 bp, Artificial Sequence
  Description of Artificial Sequence: Synthetic oligonucleotide
  Description of Combined DNA/RNA Molecule: Synthetic oligonucleotide
acggauccuuggcgcagcgtt

SEQ ID NO: 125 - DNA, 21 bp, Artificial Sequence
  Description of Artificial Sequence: Synthetic oligonucleotide
  Description of Combined DNA/RNA Molecule: Synthetic oligonucleotide
cugcgccaaggauccguggtt

SEQ ID NO: 126 - DNA, 21 bp, Artificial Sequence
  Description of Artificial Sequence: Synthetic oligonucleotide
  Description of Combined DNA/RNA Molecule: Synthetic oligonucleotide
ccacggauccuuggcgcagtt

SEQ ID NO: 127 - DNA, 21 bp, Artificial Sequence
  Description of Artificial Sequence: Synthetic oligonucleotide
  Description of Combined DNA/RNA Molecule: Synthetic oligonucleotide
auccguggagguugccuggtt

SEQ ID NO: 128 - DNA, 21 bp, Artificial Sequence
  Description of Artificial Sequence: Synthetic oligonucleotide
  Description of Combined DNA/RNA Molecule: Synthetic oligonucleotide
ccaggcaaccuccacggautt

SEQ ID NO: 129 - DNA, 21 bp, Artificial Sequence
  Description of Artificial Sequence: Synthetic oligonucleotide
  Description of Combined DNA/RNA Molecule: Synthetic oligonucleotide
gguugccuggcaccuacgutt

SEQ ID NO: 130 - DNA, 21 bp, Artificial Sequence
  Description of Artificial Sequence: Synthetic oligonucleotide
  Description of Combined DNA/RNA Molecule: Synthetic oligonucleotide
acguaggugccaggcaacctt

SEQ ID NO: 131 - DNA, 21 bp, Artificial Sequence
  Description of Artificial Sequence: Synthetic oligonucleotide
  Description of Combined DNA/RNA Molecule: Synthetic oligonucleotide
aggagacccaccucucgcatt

SEQ ID NO: 132 - DNA, 21 bp, Artificial Sequence
  Description of Artificial Sequence: Synthetic oligonucleotide
  Description of Combined DNA/RNA Molecule: Synthetic oligonucleotide
ugcgagaggugggucuccutt

SEQ ID NO: 133 - DNA, 21 bp, Artificial Sequence
  Description of Artificial Sequence: Synthetic oligonucleotide
  Description of Combined DNA/RNA Molecule: Synthetic oligonucleotide
ggagacccaccucucgcagtt

SEQ ID NO: 134 - DNA, 21 bp, Artificial Sequence
  Description of Artificial Sequence: Synthetic oligonucleotide
  Description of Combined DNA/RNA Molecule: Synthetic oligonucleotide
cugcgagaggugggucucctt

SEQ ID NO: 135 - DNA, 21 bp, Artificial Sequence
  Description of Artificial Sequence: Synthetic oligonucleotide
  Description of Combined DNA/RNA Molecule: Synthetic oligonucleotide
gagacccaccucucgcagutt

SEQ ID NO: 136 - DNA, 21 bp, Artificial Sequence
  Description of Artificial Sequence: Synthetic oligonucleotide
  Description of Combined DNA/RNA Molecule: Synthetic oligonucleotide
acugcgagaggugggucuctt

SEQ ID NO: 137 - DNA, 21 bp, Artificial Sequence
  Description of Artificial Sequence: Synthetic oligonucleotide
  Description of Combined DNA/RNA Molecule: Synthetic oligonucleotide
ccaccucucgcagucagagtt

SEQ ID NO: 138 - DNA, 21 bp, Artificial Sequence
  Description of Artificial Sequence: Synthetic oligonucleotide
  Description of Combined DNA/RNA Molecule: Synthetic oligonucleotide
cucugacugcgagagguggtt

SEQ ID NO: 139 - DNA, 21 bp, Artificial Sequence
  Description of Artificial Sequence: Synthetic oligonucleotide
  Description of Combined DNA/RNA Molecule: Synthetic oligonucleotide
ccucucgcagucagagcgctt

SEQ ID NO: 140 - DNA, 21 bp, Artificial Sequence
  Description of Artificial Sequence: Synthetic oligonucleotide
  Description of Combined DNA/RNA Molecule: Synthetic oligonucleotide
gcgcucugacugcgagaggtt

SEQ ID NO: 141 - DNA, 21 bp, Artificial Sequence
  Description of Artificial Sequence: Synthetic oligonucleotide
  Description of Combined DNA/RNA Molecule: Synthetic oligonucleotide
cucucgcagucagagcgcatt

SEQ ID NO: 142 - DNA, 21 bp, Artificial Sequence
  Description of Artificial Sequence: Synthetic oligonucleotide
  Description of Combined DNA/RNA Molecule: Synthetic oligonucleotide
ugcgcucugacugcgagagtt

SEQ ID NO: 143 - DNA, 21 bp, Artificial Sequence
  Description of Artificial Sequence: Synthetic oligonucleotide
  Description of Combined DNA/RNA Molecule: Synthetic oligonucleotide
ucucgcagucagagcgcactt

SEQ ID NO: 144 - DNA, 21 bp, Artificial Sequence
  Description of Artificial Sequence: Synthetic oligonucleotide
  Description of Combined DNA/RNA Molecule: Synthetic oligonucleotide
gugcgcucugacugcgagatt

SEQ ID NO: 145 - DNA, 21 bp, Artificial Sequence
  Description of Artificial Sequence: Synthetic oligonucleotide
  Description of Combined DNA/RNA Molecule: Synthetic oligonucleotide
cucgcagucagagcgcacutt

SEQ ID NO: 146 - DNA, 21 bp, Artificial Sequence
  Description of Artificial Sequence: Synthetic oligonucleotide
  Description of Combined DNA/RNA Molecule: Synthetic oligonucleotide
agugcgcucugacugcgagtt

SEQ ID NO: 147 - DNA, 21 bp, Artificial Sequence
  Description of Artificial Sequence: Synthetic oligonucleotide
  Description of Combined DNA/RNA Molecule: Synthetic oligonucleotide
cucgcagucagagcgcacutt

SEQ ID NO: 148 - DNA, 21 bp, Artificial Sequence
  Description of Artificial Sequence: Synthetic oligonucleotide
  Description of Combined DNA/RNA Molecule: Synthetic oligonucleotide
agugcgcucugacugcgagtt

SEQ ID NO: 149 - DNA, 21 bp, Artificial Sequence
  Description of Artificial Sequence: Synthetic oligonucleotide
  Description of Combined DNA/RNA Molecule: Synthetic oligonucleotide
gcagucagagcgcacugcctt

SEQ ID NO: 150 - DNA, 21 bp, Artificial Sequence
  Description of Artificial Sequence: Synthetic oligonucleotide
  Description of Combined DNA/RNA Molecule: Synthetic oligonucleotide
ggcagugcgcucugacugctt

SEQ ID NO: 151 - DNA, 21 bp, Artificial Sequence
  Description of Artificial Sequence: Synthetic oligonucleotide
  Description of Combined DNA/RNA Molecule: Synthetic oligonucleotide
gcagucagagcgcacugcctt

SEQ ID NO: 152 - DNA, 21 bp, Artificial Sequence
  Description of Artificial Sequence: Synthetic oligonucleotide
  Description of Combined DNA/RNA Molecule: Synthetic oligonucleotide
ggcagugcgcucugacugctt

SEQ ID NO: 153 - DNA, 21 bp, Artificial Sequence
  Description of Artificial Sequence: Synthetic oligonucleotide
  Description of Combined DNA/RNA Molecule: Synthetic oligonucleotide
gggauaccucaccaagauctt

SEQ ID NO: 154 - DNA, 21 bp, Artificial Sequence
  Description of Artificial Sequence: Synthetic oligonucleotide
  Description of Combined DNA/RNA Molecule: Synthetic oligonucleotide
gaucuuggugagguauccctt

SEQ ID NO: 155 - DNA, 21 bp, Artificial Sequence
  Description of Artificial Sequence: Synthetic oligonucleotide
  Description of Combined DNA/RNA Molecule: Synthetic oligonucleotide
gggauaccucaccaagauctt

SEQ ID NO: 156 - DNA, 21 bp, Artificial Sequence
  Description of Artificial Sequence: Synthetic oligonucleotide
  Description of Combined DNA/RNA Molecule: Synthetic oligonucleotide
gaucuuggugagguauccctt

SEQ ID NO: 157 - DNA, 21 bp, Artificial Sequence
  Description of Artificial Sequence: Synthetic oligonucleotide
  Description of Combined DNA/RNA Molecule: Synthetic oligonucleotide
uggugaagaugaguggcgatt

SEQ ID NO: 158 - DNA, 21 bp, Artificial Sequence
  Description of Artificial Sequence: Synthetic oligonucleotide
  Description of Combined DNA/RNA Molecule: Synthetic oligonucleotide
ucgccacucaucuucaccatt

SEQ ID NO: 159 - DNA, 21 bp, Artificial Sequence
  Description of Artificial Sequence: Synthetic oligonucleotide
  Description of Combined DNA/RNA Molecule: Synthetic oligonucleotide
uggugaagaugaguggcgatt

SEQ ID NO: 160 - DNA, 21 bp, Artificial Sequence
  Description of Artificial Sequence: Synthetic oligonucleotide
  Description of Combined DNA/RNA Molecule: Synthetic oligonucleotide
ucgccacucaucuucaccatt

SEQ ID NO: 161 - DNA, 21 bp, Artificial Sequence
  Description of Artificial Sequence: Synthetic oligonucleotide
  Description of Combined DNA/RNA Molecule: Synthetic oligonucleotide
gaagaugaguggcgaccugtt

SEQ ID NO: 162 - DNA, 21 bp, Artificial Sequence
  Description of Artificial Sequence: Synthetic oligonucleotide
  Description of Combined DNA/RNA Molecule: Synthetic oligonucleotide
caggucgccacucaucuuctt

SEQ ID NO: 163 - DNA, 21 bp, Artificial Sequence
  Description of Artificial Sequence: Synthetic oligonucleotide
  Description of Combined DNA/RNA Molecule: Synthetic oligonucleotide
gaagaugaguggcgaccugtt

SEQ ID NO: 164 - DNA, 21 bp, Artificial Sequence
  Description of Artificial Sequence: Synthetic oligonucleotide
  Description of Combined DNA/RNA Molecule: Synthetic oligonucleotide
caggucgccacucaucuuctt

SEQ ID NO: 165 - DNA, 21 bp, Artificial Sequence
  Description of Artificial Sequence: Synthetic oligonucleotide
  Description of Combined DNA/RNA Molecule: Synthetic oligonucleotide
cccaugucgacuacaucgatt

SEQ ID NO: 166 - DNA, 21 bp, Artificial Sequence
  Description of Artificial Sequence: Synthetic oligonucleotide
  Description of Combined DNA/RNA Molecule: Synthetic oligonucleotide
ucgauguagucgacaugggtt

SEQ ID NO: 167 - DNA, 21 bp, Artificial Sequence
  Description of Artificial Sequence: Synthetic oligonucleotide
  Description of Combined DNA/RNA Molecule: Synthetic oligonucleotide
cccaugucgacuacaucgatt

SEQ ID NO: 168 - DNA, 21 bp, Artificial Sequence
  Description of Artificial Sequence: Synthetic oligonucleotide
  Description of Combined DNA/RNA Molecule: Synthetic oligonucleotide
ucgauguagucgacaugggtt

SEQ ID NO: 169 - DNA, 21 bp, Artificial Sequence
  Description of Artificial Sequence: Synthetic oligonucleotide
  Description of Combined DNA/RNA Molecule: Synthetic oligonucleotide
aucgaggaggacuccucugtt

SEQ ID NO: 170 - DNA, 21 bp, Artificial Sequence
  Description of Artificial Sequence: Synthetic oligonucleotide
  Description of Combined DNA/RNA Molecule: Synthetic oligonucleotide
cagaggaguccuccucgautt

SEQ ID NO: 171 - DNA, 21 bp, Artificial Sequence
  Description of Artificial Sequence: Synthetic oligonucleotide
  Description of Combined DNA/RNA Molecule: Synthetic oligonucleotide
aucgaggaggacuccucugtt

SEQ ID NO: 172 - DNA, 21 bp, Artificial Sequence
  Description of Artificial Sequence: Synthetic oligonucleotide
  Description of Combined DNA/RNA Molecule: Synthetic oligonucleotide
cagaggaguccuccucgautt

SEQ ID NO: 173 - DNA, 21 bp, Artificial Sequence
  Description of Artificial Sequence: Synthetic oligonucleotide
  Description of Combined DNA/RNA Molecule: Synthetic oligonucleotide
ggaaccuggagcggauuactt

SEQ ID NO: 174 - DNA, 21 bp, Artificial Sequence
  Description of Artificial Sequence: Synthetic oligonucleotide
  Description of Combined DNA/RNA Molecule: Synthetic oligonucleotide
guaauccgcuccagguucctt

SEQ ID NO: 175 - DNA, 21 bp, Artificial Sequence
  Description of Artificial Sequence: Synthetic oligonucleotide
  Description of Combined DNA/RNA Molecule: Synthetic oligonucleotide
gaaccuggagcggauuacctt

SEQ ID NO: 176 - DNA, 21 bp, Artificial Sequence
  Description of Artificial Sequence: Synthetic oligonucleotide
  Description of Combined DNA/RNA Molecule: Synthetic oligonucleotide
gguaauccgcuccagguuctt

SEQ ID NO: 177 - DNA, 21 bp, Artificial Sequence
  Description of Artificial Sequence: Synthetic oligonucleotide
  Description of Combined DNA/RNA Molecule: Synthetic oligonucleotide
aaccuggagcggauuaccctt

SEQ ID NO: 178 - DNA, 21 bp, Artificial Sequence
  Description of Artificial Sequence: Synthetic oligonucleotide
  Description of Combined DNA/RNA Molecule: Synthetic oligonucleotide
ggguaauccgcuccagguutt

SEQ ID NO: 179 - DNA, 21 bp, Artificial Sequence
  Description of Artificial Sequence: Synthetic oligonucleotide
  Description of Combined DNA/RNA Molecule: Synthetic oligonucleotide
cccuccacgguaccgggcgtt

SEQ ID NO: 180 - DNA, 21 bp, Artificial Sequence
  Description of Artificial Sequence: Synthetic oligonucleotide
  Description of Combined DNA/RNA Molecule: Synthetic oligonucleotide
cgcccgguaccguggagggtt

SEQ ID NO: 181 - DNA, 21 bp, Artificial Sequence
  Description of Artificial Sequence: Synthetic oligonucleotide
  Description of Combined DNA/RNA Molecule: Synthetic oligonucleotide
cacgguaccgggcggaugatt

SEQ ID NO: 182 - DNA, 21 bp, Artificial Sequence
  Description of Artificial Sequence: Synthetic oligonucleotide
  Description of Combined DNA/RNA Molecule: Synthetic oligonucleotide
ucauccgcccgguaccgugtt

SEQ ID NO: 183 - DNA, 21 bp, Artificial Sequence
  Description of Artificial Sequence: Synthetic oligonucleotide
  Description of Combined DNA/RNA Molecule: Synthetic oligonucleotide
cacgguaccgggcggaugatt

SEQ ID NO: 184 - DNA, 21 bp, Artificial Sequence
  Description of Artificial Sequence: Synthetic oligonucleotide
  Description of Combined DNA/RNA Molecule: Synthetic oligonucleotide
ucauccgcccgguaccgugtt

SEQ ID NO: 185 - DNA, 21 bp, Artificial Sequence
  Description of Artificial Sequence: Synthetic oligonucleotide
  Description of Combined DNA/RNA Molecule: Synthetic oligonucleotide
acgguaccgggcggaugaatt

SEQ ID NO: 186 - DNA, 21 bp, Artificial Sequence
  Description of Artificial Sequence: Synthetic oligonucleotide
  Description of Combined DNA/RNA Molecule: Synthetic oligonucleotide
uucauccgcccgguaccgutt

SEQ ID NO: 187 - DNA, 21 bp, Artificial Sequence
  Description of Artificial Sequence: Synthetic oligonucleotide
  Description of Combined DNA/RNA Molecule: Synthetic oligonucleotide
acgguaccgggcggaugaatt

SEQ ID NO: 188 - DNA, 21 bp, Artificial Sequence
  Description of Artificial Sequence: Synthetic oligonucleotide
  Description of Combined DNA/RNA Molecule: Synthetic oligonucleotide
uucauccgcccgguaccgutt

SEQ ID NO: 189 - DNA, 21 bp, Artificial Sequence
  Description of Artificial Sequence: Synthetic oligonucleotide
  Description of Combined DNA/RNA Molecule: Synthetic oligonucleotide
cgguaccgggcggaugaautt

SEQ ID NO: 190 - DNA, 21 bp, Artificial Sequence
  Description of Artificial Sequence: Synthetic oligonucleotide
  Description of Combined DNA/RNA Molecule: Synthetic oligonucleotide
auucauccgcccgguaccgtt

SEQ ID NO: 191 - DNA, 21 bp, Artificial Sequence
  Description of Artificial Sequence: Synthetic oligonucleotide
  Description of Combined DNA/RNA Molecule: Synthetic oligonucleotide
cgguaccgggcggaugaautt

SEQ ID NO: 192 - DNA, 21 bp, Artificial Sequence
  Description of Artificial Sequence: Synthetic oligonucleotide
  Description of Combined DNA/RNA Molecule: Synthetic oligonucleotide
auucauccgcccgguaccgtt

SEQ ID NO: 193 - DNA, 21 bp, Artificial Sequence
  Description of Artificial Sequence: Synthetic oligonucleotide
  Description of Combined DNA/RNA Molecule: Synthetic oligonucleotide
gguaccgggcggaugaauatt

SEQ ID NO: 194 - DNA, 21 bp, Artificial Sequence
  Description of Artificial Sequence: Synthetic oligonucleotide
  Description of Combined DNA/RNA Molecule: Synthetic oligonucleotide
uauucauccgcccgguacctt

SEQ ID NO: 195 - DNA, 21 bp, Artificial Sequence
  Description of Artificial Sequence: Synthetic oligonucleotide
  Description of Combined DNA/RNA Molecule: Synthetic oligonucleotide
gguaccgggcggaugaauatt

SEQ ID NO: 196 - DNA, 21 bp, Artificial Sequence
  Description of Artificial Sequence: Synthetic oligonucleotide
  Description of Combined DNA/RNA Molecule: Synthetic oligonucleotide
uauucauccgcccgguacctt

SEQ ID NO: 197 - DNA, 21 bp, Artificial Sequence
  Description of Artificial Sequence: Synthetic oligonucleotide
  Description of Combined DNA/RNA Molecule: Synthetic oligonucleotide
guaccgggcggaugaauactt

SEQ ID NO: 198 - DNA, 21 bp, Artificial Sequence
  Description of Artificial Sequence: Synthetic oligonucleotide
  Description of Combined DNA/RNA Molecule: Synthetic oligonucleotide
guauucauccgcccgguactt

SEQ ID NO: 199 - DNA, 21 bp, Artificial Sequence
  Description of Artificial Sequence: Synthetic oligonucleotide
  Description of Combined DNA/RNA Molecule: Synthetic oligonucleotide
guaccgggcggaugaauactt

SEQ ID NO: 200 - DNA, 21 bp, Artificial Sequence
  Description of Artificial Sequence: Synthetic oligonucleotide
  Description of Combined DNA/RNA Molecule: Synthetic oligonucleotide
guauucauccgcccgguactt

SEQ ID NO: 201 - DNA, 21 bp, Artificial Sequence
  Description of Artificial Sequence: Synthetic oligonucleotide
  Description of Combined DNA/RNA Molecule: Synthetic oligonucleotide
accgggcggaugaauaccatt

SEQ ID NO: 202 - DNA, 21 bp, Artificial Sequence
  Description of Artificial Sequence: Synthetic oligonucleotide
  Description of Combined DNA/RNA Molecule: Synthetic oligonucleotide
ugguauucauccgcccggutt

SEQ ID NO: 203 - DNA, 21 bp, Artificial Sequence
  Description of Artificial Sequence: Synthetic oligonucleotide
  Description of Combined DNA/RNA Molecule: Synthetic oligonucleotide
accgggcggaugaauaccatt

SEQ ID NO: 204 - DNA, 21 bp, Artificial Sequence
  Description of Artificial Sequence: Synthetic oligonucleotide
  Description of Combined DNA/RNA Molecule: Synthetic oligonucleotide
ugguauucauccgcccggutt

SEQ ID NO: 205 - DNA, 21 bp, Artificial Sequence
  Description of Artificial Sequence: Synthetic oligonucleotide
  Description of Combined DNA/RNA Molecule: Synthetic oligonucleotide
ccgggcggaugaauaccagtt

SEQ ID NO: 206 - DNA, 21 bp, Artificial Sequence
  Description of Artificial Sequence: Synthetic oligonucleotide
  Description of Combined DNA/RNA Molecule: Synthetic oligonucleotide
cugguauucauccgcccggtt

SEQ ID NO: 207 - DNA, 21 bp, Artificial Sequence
  Description of Artificial Sequence: Synthetic oligonucleotide
  Description of Combined DNA/RNA Molecule: Synthetic oligonucleotide
ccgggcggaugaauaccagtt

SEQ ID NO: 208 - DNA, 21 bp, Artificial Sequence
  Description of Artificial Sequence: Synthetic oligonucleotide
  Description of Combined DNA/RNA Molecule: Synthetic oligonucleotide
cugguauucauccgcccggtt

SEQ ID NO: 209 - DNA, 21 bp, Artificial Sequence
  Description of Artificial Sequence: Synthetic oligonucleotide
  Description of Combined DNA/RNA Molecule: Synthetic oligonucleotide
ccugguggagguguaucuctt

SEQ ID NO: 210 - DNA, 21 bp, Artificial Sequence
  Description of Artificial Sequence: Synthetic oligonucleotide
  Description of Combined DNA/RNA Molecule: Synthetic oligonucleotide
gagauacaccuccaccaggtt

SEQ ID NO: 211 - DNA, 21 bp, Artificial Sequence
  Description of Artificial Sequence: Synthetic oligonucleotide
  Description of Combined DNA/RNA Molecule: Synthetic oligonucleotide
ccugguggagguguaucuctt

SEQ ID NO: 212 - DNA, 21 bp, Artificial Sequence
  Description of Artificial Sequence: Synthetic oligonucleotide
  Description of Combined DNA/RNA Molecule: Synthetic oligonucleotide
gagauacaccuccaccaggtt

SEQ ID NO: 213 - DNA, 21 bp, Artificial Sequence
  Description of Artificial Sequence: Synthetic oligonucleotide
  Description of Combined DNA/RNA Molecule: Synthetic oligonucleotide
cugguggagguguaucucctt

SEQ ID NO: 214 - DNA, 21 bp, Artificial Sequence
  Description of Artificial Sequence: Synthetic oligonucleotide
  Description of Combined DNA/RNA Molecule: Synthetic oligonucleotide
ggagauacaccuccaccagtt

SEQ ID NO: 215 - DNA, 21 bp, Artificial Sequence
  Description of Artificial Sequence: Synthetic oligonucleotide
  Description of Combined DNA/RNA Molecule: Synthetic oligonucleotide
cugguggagguguaucucctt

SEQ ID NO: 216 - DNA, 21 bp, Artificial Sequence
  Description of Artificial Sequence: Synthetic oligonucleotide
  Description of Combined DNA/RNA Molecule: Synthetic oligonucleotide
ggagauacaccuccaccagtt

SEQ ID NO: 217 - DNA, 21 bp, Artificial Sequence
  Description of Artificial Sequence: Synthetic oligonucleotide
  Description of Combined DNA/RNA Molecule: Synthetic oligonucleotide
ugguggagguguaucuccutt

SEQ ID NO: 218 - DNA, 21 bp, Artificial Sequence
  Description of Artificial Sequence: Synthetic oligonucleotide
  Description of Combined DNA/RNA Molecule: Synthetic oligonucleotide
aggagauacaccuccaccatt

SEQ ID NO: 219 - DNA, 21 bp, Artificial Sequence
  Description of Artificial Sequence: Synthetic oligonucleotide
  Description of Combined DNA/RNA Molecule: Synthetic oligonucleotide
ugguggagguguaucuccutt

SEQ ID NO: 220 - DNA, 21 bp, Artificial Sequence
  Description of Artificial Sequence: Synthetic oligonucleotide
  Description of Combined DNA/RNA Molecule: Synthetic oligonucleotide
aggagauacaccuccaccatt

SEQ ID NO: 221 - DNA, 21 bp, Artificial Sequence
  Description of Artificial Sequence: Synthetic oligonucleotide
  Description of Combined DNA/RNA Molecule: Synthetic oligonucleotide
gguggagguguaucuccuatt

SEQ ID NO: 222 - DNA, 21 bp, Artificial Sequence
  Description of Artificial Sequence: Synthetic oligonucleotide
  Description of Combined DNA/RNA Molecule: Synthetic oligonucleotide
uaggagauacaccuccacctt

SEQ ID NO: 223 - DNA, 21 bp, Artificial Sequence
  Description of Artificial Sequence: Synthetic oligonucleotide
  Description of Combined DNA/RNA Molecule: Synthetic oligonucleotide
gguggagguguaucuccuatt

SEQ ID NO: 224 - DNA, 21 bp, Artificial Sequence
  Description of Artificial Sequence: Synthetic oligonucleotide
  Description of Combined DNA/RNA Molecule: Synthetic oligonucleotide
uaggagauacaccuccacctt

SEQ ID NO: 225 - DNA, 21 bp, Artificial Sequence
  Description of Artificial Sequence: Synthetic oligonucleotide
  Description of Combined DNA/RNA Molecule: Synthetic oligonucleotide
ggagguguaucuccuagactt

SEQ ID NO: 226 - DNA, 21 bp, Artificial Sequence
  Description of Artificial Sequence: Synthetic oligonucleotide
  Description of Combined DNA/RNA Molecule: Synthetic oligonucleotide
gucuaggagauacaccucctt

SEQ ID NO: 227 - DNA, 21 bp, Artificial Sequence
  Description of Artificial Sequence: Synthetic oligonucleotide
  Description of Combined DNA/RNA Molecule: Synthetic oligonucleotide
ggagguguaucuccuagactt

SEQ ID NO: 228 - DNA, 21 bp, Artificial Sequence
  Description of Artificial Sequence: Synthetic oligonucleotide
  Description of Combined DNA/RNA Molecule: Synthetic oligonucleotide
gucuaggagauacaccucctt

SEQ ID NO: 229 - DNA, 21 bp, Artificial Sequence
  Description of Artificial Sequence: Synthetic oligonucleotide
  Description of Combined DNA/RNA Molecule: Synthetic oligonucleotide
agguguaucuccuagacactt

SEQ ID NO: 230 - DNA, 21 bp, Artificial Sequence
  Description of Artificial Sequence: Synthetic oligonucleotide
  Description of Combined DNA/RNA Molecule: Synthetic oligonucleotide
gugucuaggagauacaccutt

SEQ ID NO: 231 - DNA, 21 bp, Artificial Sequence
  Description of Artificial Sequence: Synthetic oligonucleotide
  Description of Combined DNA/RNA Molecule: Synthetic oligonucleotide
agguguaucuccuagacactt

SEQ ID NO: 232 - DNA, 21 bp, Artificial Sequence
  Description of Artificial Sequence: Synthetic oligonucleotide
  Description of Combined DNA/RNA Molecule: Synthetic oligonucleotide
gugucuaggagauacaccutt

SEQ ID NO: 233 - DNA, 21 bp, Artificial Sequence
  Description of Artificial Sequence: Synthetic oligonucleotide
  Description of Combined DNA/RNA Molecule: Synthetic oligonucleotide
agguguaucuccuagacactt

SEQ ID NO: 234 - DNA, 21 bp, Artificial Sequence
  Description of Artificial Sequence: Synthetic oligonucleotide
  Description of Combined DNA/RNA Molecule: Synthetic oligonucleotide
gugucuaggagauacaccutt

SEQ ID NO: 235 - DNA, 21 bp, Artificial Sequence
  Description of Artificial Sequence: Synthetic oligonucleotide
  Description of Combined DNA/RNA Molecule: Synthetic oligonucleotide
agguguaucuccuagacactt

SEQ ID NO: 236 - DNA, 21 bp, Artificial Sequence
  Description of Artificial Sequence: Synthetic oligonucleotide
  Description of Combined DNA/RNA Molecule: Synthetic oligonucleotide
gugucuaggagauacaccutt

SEQ ID NO: 237 - DNA, 21 bp, Artificial Sequence
  Description of Artificial Sequence: Synthetic oligonucleotide
  Description of Combined DNA/RNA Molecule: Synthetic oligonucleotide
agguguaucuccuagacactt

SEQ ID NO: 238 - DNA, 21 bp, Artificial Sequence
  Description of Artificial Sequence: Synthetic oligonucleotide
  Description of Combined DNA/RNA Molecule: Synthetic oligonucleotide
gugucuaggagauacaccutt

SEQ ID NO: 239 - DNA, 21 bp, Artificial Sequence
  Description of Artificial Sequence: Synthetic oligonucleotide
  Description of Combined DNA/RNA Molecule: Synthetic oligonucleotide
agguguaucuccuagacactt

SEQ ID NO: 240 - DNA, 21 bp, Artificial Sequence
  Description of Artificial Sequence: Synthetic oligonucleotide
  Description of Combined DNA/RNA Molecule: Synthetic oligonucleotide
gugucuaggagauacaccutt

SEQ ID NO: 241 - DNA, 21 bp, Artificial Sequence
  Description of Artificial Sequence: Synthetic oligonucleotide
  Description of Combined DNA/RNA Molecule: Synthetic oligonucleotide
agguguaucuccuagacactt

SEQ ID NO: 242 - DNA, 21 bp, Artificial Sequence
  Description of Artificial Sequence: Synthetic oligonucleotide
  Description of Combined DNA/RNA Molecule: Synthetic oligonucleotide
gugucuaggagauacaccutt

SEQ ID NO: 243 - DNA, 21 bp, Artificial Sequence
  Description of Artificial Sequence: Synthetic oligonucleotide
  Description of Combined DNA/RNA Molecule: Synthetic oligonucleotide
agguguaucuccuagacactt

SEQ ID NO: 244 - DNA, 21 bp, Artificial Sequence
  Description of Artificial Sequence: Synthetic oligonucleotide
  Description of Combined DNA/RNA Molecule: Synthetic oligonucleotide
gugucuaggagauacaccutt

SEQ ID NO: 245 - DNA, 21 bp, Artificial Sequence
  Description of Artificial Sequence: Synthetic oligonucleotide
  Description of Combined DNA/RNA Molecule: Synthetic oligonucleotide
agguguaucuccuagacactt

SEQ ID NO: 246 - DNA, 21 bp, Artificial Sequence
  Description of Artificial Sequence: Synthetic oligonucleotide
  Description of Combined DNA/RNA Molecule: Synthetic oligonucleotide
gugucuaggagauacaccutt

SEQ ID NO: 247 - DNA, 21 bp, Artificial Sequence
  Description of Artificial Sequence: Synthetic oligonucleotide
  Description of Combined DNA/RNA Molecule: Synthetic oligonucleotide
gcacccucauaggccuggatt

SEQ ID NO: 248 - DNA, 21 bp, Artificial Sequence
  Description of Artificial Sequence: Synthetic oligonucleotide
  Description of Combined DNA/RNA Molecule: Synthetic oligonucleotide
uccaggccuaugagggugctt

SEQ ID NO: 249 - DNA, 21 bp, Artificial Sequence
  Description of Artificial Sequence: Synthetic oligonucleotide
  Description of Combined DNA/RNA Molecule: Synthetic oligonucleotide
gcacccucauaggccuggatt

SEQ ID NO: 250 - DNA, 21 bp, Artificial Sequence
  Description of Artificial Sequence: Synthetic oligonucleotide
  Description of Combined DNA/RNA Molecule: Synthetic oligonucleotide
uccaggccuaugagggugctt

SEQ ID NO: 251 - DNA, 21 bp, Artificial Sequence
  Description of Artificial Sequence: Synthetic oligonucleotide
  Description of Combined DNA/RNA Molecule: Synthetic oligonucleotide
gcacccucauaggccuggatt

SEQ ID NO: 252 - DNA, 21 bp, Artificial Sequence
  Description of Artificial Sequence: Synthetic oligonucleotide
  Description of Combined DNA/RNA Molecule: Synthetic oligonucleotide
uccaggccuaugagggugctt

SEQ ID NO: 253 - DNA, 21 bp, Artificial Sequence
  Description of Artificial Sequence: Synthetic oligonucleotide
  Description of Combined DNA/RNA Molecule: Synthetic oligonucleotide
gcacccucauaggccuggatt

SEQ ID NO: 254 - DNA, 21 bp, Artificial Sequence
  Description of Artificial Sequence: Synthetic oligonucleotide
  Description of Combined DNA/RNA Molecule: Synthetic oligonucleotide
uccaggccuaugagggugctt

SEQ ID NO: 255 - DNA, 21 bp, Artificial Sequence
  Description of Artificial Sequence: Synthetic oligonucleotide
  Description of Combined DNA/RNA Molecule: Synthetic oligonucleotide
gcacccucauaggccuggatt

SEQ ID NO: 256 - DNA, 21 bp, Artificial Sequence
  Description of Artificial Sequence: Synthetic oligonucleotide
  Description of Combined DNA/RNA Molecule: Synthetic oligonucleotide
uccaggccuaugagggugctt

SEQ ID NO: 257 - DNA, 21 bp, Artificial Sequence
  Description of Artificial Sequence: Synthetic oligonucleotide
  Description of Combined DNA/RNA Molecule: Synthetic oligonucleotide
gcacccucauaggccuggatt

SEQ ID NO: 258 - DNA, 21 bp, Artificial Sequence
  Description of Artificial Sequence: Synthetic oligonucleotide
  Description of Combined DNA/RNA Molecule: Synthetic oligonucleotide
uccaggccuaugagggugctt

SEQ ID NO: 259 - DNA, 21 bp, Artificial Sequence
  Description of Artificial Sequence: Synthetic oligonucleotide
  Description of Combined DNA/RNA Molecule: Synthetic oligonucleotide
gcacccucauaggccuggatt

SEQ ID NO: 260 - DNA, 21 bp, Artificial Sequence
  Description of Artificial Sequence: Synthetic oligonucleotide
  Description of Combined DNA/RNA Molecule: Synthetic oligonucleotide
uccaggccuaugagggugctt

SEQ ID NO: 261 - DNA, 21 bp, Artificial Sequence
  Description of Artificial Sequence: Synthetic oligonucleotide
  Description of Combined DNA/RNA Molecule: Synthetic oligonucleotide
uguaucuccuagacaccagtt

SEQ ID NO: 262 - DNA, 21 bp, Artificial Sequence
  Description of Artificial Sequence: Synthetic oligonucleotide
  Description of Combined DNA/RNA Molecule: Synthetic oligonucleotide
cuggugucuaggagauacatt

SEQ ID NO: 263 - DNA, 21 bp, Artificial Sequence
  Description of Artificial Sequence: Synthetic oligonucleotide
  Description of Combined DNA/RNA Molecule: Synthetic oligonucleotide
uguaucuccuagacaccagtt

SEQ ID NO: 264 - DNA, 21 bp, Artificial Sequence
  Description of Artificial Sequence: Synthetic oligonucleotide
  Description of Combined DNA/RNA Molecule: Synthetic oligonucleotide
cuggugucuaggagauacatt

SEQ ID NO: 265 - DNA, 21 bp, Artificial Sequence
  Description of Artificial Sequence: Synthetic oligonucleotide
  Description of Combined DNA/RNA Molecule: Synthetic oligonucleotide
ucuccuagacaccagcauatt

SEQ ID NO: 266 - DNA, 21 bp, Artificial Sequence
  Description of Artificial Sequence: Synthetic oligonucleotide
  Description of Combined DNA/RNA Molecule: Synthetic oligonucleotide
uaugcuggugucuaggagatt

SEQ ID NO: 267 - DNA, 21 bp, Artificial Sequence
  Description of Artificial Sequence: Synthetic oligonucleotide
  Description of Combined DNA/RNA Molecule: Synthetic oligonucleotide
ucuccuagacaccagcauatt

SEQ ID NO: 268 - DNA, 21 bp, Artificial Sequence
  Description of Artificial Sequence: Synthetic oligonucleotide
  Description of Combined DNA/RNA Molecule: Synthetic oligonucleotide
uaugcuggugucuaggagatt

SEQ ID NO: 269 - DNA, 21 bp, Artificial Sequence
  Description of Artificial Sequence: Synthetic oligonucleotide
  Description of Combined DNA/RNA Molecule: Synthetic oligonucleotide
ucuccuagacaccagcauatt

SEQ ID NO: 270 - DNA, 21 bp, Artificial Sequence
  Description of Artificial Sequence: Synthetic oligonucleotide
  Description of Combined DNA/RNA Molecule: Synthetic oligonucleotide
uaugcuggugucuaggagatt

SEQ ID NO: 271 - DNA, 21 bp, Artificial Sequence
  Description of Artificial Sequence: Synthetic oligonucleotide
  Description of Combined DNA/RNA Molecule: Synthetic oligonucleotide
ucuccuagacaccagcauatt

SEQ ID NO: 272 - DNA, 21 bp, Artificial Sequence
  Description of Artificial Sequence: Synthetic oligonucleotide
  Description of Combined DNA/RNA Molecule: Synthetic oligonucleotide
uaugcuggugucuaggagatt

SEQ ID NO: 273 - DNA, 21 bp, Artificial Sequence
  Description of Artificial Sequence: Synthetic oligonucleotide
  Description of Combined DNA/RNA Molecule: Synthetic oligonucleotide
ucuccuagacaccagcauatt

SEQ ID NO: 274 - DNA, 21 bp, Artificial Sequence
  Description of Artificial Sequence: Synthetic oligonucleotide
  Description of Combined DNA/RNA Molecule: Synthetic oligonucleotide
uaugcuggugucuaggagatt

SEQ ID NO: 275 - DNA, 21 bp, Artificial Sequence
  Description of Artificial Sequence: Synthetic oligonucleotide
  Description of Combined DNA/RNA Molecule: Synthetic oligonucleotide
ucuccuagacaccagcauatt

SEQ ID NO: 276 - DNA, 21 bp, Artificial Sequence
  Description of Artificial Sequence: Synthetic oligonucleotide
  Description of Combined DNA/RNA Molecule: Synthetic oligonucleotide
uaugcuggugucuaggagatt

SEQ ID NO: 277 - DNA, 21 bp, Artificial Sequence
  Description of Artificial Sequence: Synthetic oligonucleotide
  Description of Combined DNA/RNA Molecule: Synthetic oligonucleotide
ucuccuaaacaccagcauatt

SEQ ID NO: 278 - DNA, 21 bp, Artificial Sequence
  Description of Artificial Sequence: Synthetic oligonucleotide
  Description of Combined DNA/RNA Molecule: Synthetic oligonucleotide
uaugcuggugucuaggagatt

SEQ ID NO: 279 - DNA, 21 bp, Artificial Sequence
  Description of Artificial Sequence: Synthetic oligonucleotide
  Description of Combined DNA/RNA Molecule: Synthetic oligonucleotide
ucuccuagacaccagcauatt

SEQ ID NO: 280 - DNA, 21 bp, Artificial Sequence
  Description of Artificial Sequence: Synthetic oligonucleotide
  Description of Combined DNA/RNA Molecule: Synthetic oligonucleotide
uaugcuggugucuaggagatt

SEQ ID NO: 281 - DNA, 21 bp, Artificial Sequence
  Description of Artificial Sequence: Synthetic oligonucleotide
  Description of Combined DNA/RNA Molecule: Synthetic oligonucleotide
ucuccuagacaccagcauatt

SEQ ID NO: 282 - DNA, 21 bp, Artificial Sequence
  Description of Artificial Sequence: Synthetic oligonucleotide
  Description of Combined DNA/RNA Molecule: Synthetic oligonucleotide
uaugcuggugucuaggagatt

SEQ ID NO: 283 - DNA, 21 bp, Artificial Sequence
  Description of Artificial Sequence: Synthetic oligonucleotide
  Description of Combined DNA/RNA Molecule: Synthetic oligonucleotide
aggccuggaguuuauucggtt

SEQ ID NO: 284 - DNA, 21 bp, Artificial Sequence
  Description of Artificial Sequence: Synthetic oligonucleotide
  Description of Combined DNA/RNA Molecule: Synthetic oligonucleotide
ccgaauaaacuccaggccutt

SEQ ID NO: 285 - DNA, 21 bp, Artificial Sequence
  Description of Artificial Sequence: Synthetic oligonucleotide
  Description of Combined DNA/RNA Molecule: Synthetic oligonucleotide
aggccuggaguuuauucggtt

SEQ ID NO: 286 - DNA, 21 bp, Artificial Sequence
  Description of Artificial Sequence: Synthetic oligonucleotide
  Description of Combined DNA/RNA Molecule: Synthetic oligonucleotide
ccgaauaaacuccaggccutt

SEQ ID NO: 287 - DNA, 21 bp, Artificial Sequence
  Description of Artificial Sequence: Synthetic oligonucleotide
  Description of Combined DNA/RNA Molecule: Synthetic oligonucleotide
aggccuggaguuuauucggtt

SEQ ID NO: 288 - DNA, 21 bp, Artificial Sequence
  Description of Artificial Sequence: Synthetic oligonucleotide
  Description of Combined DNA/RNA Molecule: Synthetic oligonucleotide
ccgaauaaacuccaggccutt

SEQ ID NO: 289 - DNA, 21 bp, Artificial Sequence
  Description of Artificial Sequence: Synthetic oligonucleotide
  Description of Combined DNA/RNA Molecule: Synthetic oligonucleotide
aggccuggaguuuauucggtt

SEQ ID NO: 290 - DNA, 21 bp, Artificial Sequence
  Description of Artificial Sequence: Synthetic oligonucleotide
  Description of Combined DNA/RNA Molecule: Synthetic oligonucleotide
ccgaauaaacuccaggccutt

SEQ ID NO: 291 - DNA, 21 bp, Artificial Sequence
  Description of Artificial Sequence: Synthetic oligonucleotide
  Description of Combined DNA/RNA Molecule: Synthetic oligonucleotide
aggccuggaguuuauucggtt

SEQ ID NO: 292 - DNA, 21 bp, Artificial Sequence
  Description of Artificial Sequence: Synthetic oligonucleotide
  Description of Combined DNA/RNA Molecule: Synthetic oligonucleotide
ccgaauaaacuccaggccutt

SEQ ID NO: 293 - DNA, 21 bp, Artificial Sequence
  Description of Artificial Sequence: Synthetic oligonucleotide
  Description of Combined DNA/RNA Molecule: Synthetic oligonucleotide
aggccuggaguuuauucggtt

SEQ ID NO: 294 - DNA, 21 bp, Artificial Sequence
  Description of Artificial Sequence: Synthetic oligonucleotide
  Description of Combined DNA/RNA Molecule: Synthetic oligonucleotide
ccgaauaaacuccaggccutt

SEQ ID NO: 295 - DNA, 21 bp, Artificial Sequence
  Description of Artificial Sequence: Synthetic oligonucleotide
  Description of Combined DNA/RNA Molecule: Synthetic oligonucleotide
aggccuggaguuuauucggtt

SEQ ID NO: 296 - DNA, 21 bp, Artificial Sequence
  Description of Artificial Sequence: Synthetic oligonucleotide
  Description of Combined DNA/RNA Molecule: Synthetic oligonucleotide
ccgaauaaacuccaggccutt

SEQ ID NO: 297 - DNA, 21 bp, Artificial Sequence
  Description of Artificial Sequence: Synthetic oligonucleotide
  Description of Combined DNA/RNA Molecule: Synthetic oligonucleotide
cuccuagacaccagcauactt

SEQ ID NO: 298 - DNA, 21 bp, Artificial Sequence
  Description of Artificial Sequence: Synthetic oligonucleotide
  Description of Combined DNA/RNA Molecule: Synthetic oligonucleotide
guaugcuggugucuaggagtt

SEQ ID NO: 299 - DNA, 21 bp, Artificial Sequence
  Description of Artificial Sequence: Synthetic oligonucleotide
  Description of Combined DNA/RNA Molecule: Synthetic oligonucleotide
cuccuagacaccagcauactt

SEQ ID NO: 300 - DNA, 21 bp, Artificial Sequence
  Description of Artificial Sequence: Synthetic oligonucleotide
  Description of Combined DNA/RNA Molecule: Synthetic oligonucleotide
guaugcuggugucuaggagtt

SEQ ID NO: 301 - DNA, 21 bp, Artificial Sequence
  Description of Artificial Sequence: Synthetic oligonucleotide
  Description of Combined DNA/RNA Molecule: Synthetic oligonucleotide
uccuagacaccagcauacatt

SEQ ID NO: 302 - DNA, 21 bp, Artificial Sequence
  Description of Artificial Sequence: Synthetic oligonucleotide
  Description of Combined DNA/RNA Molecule: Synthetic oligonucleotide
uguaugcuggugucuaggatt

SEQ ID NO: 303 - DNA, 21 bp, Artificial Sequence
  Description of Artificial Sequence: Synthetic oligonucleotide
  Description of Combined DNA/RNA Molecule: Synthetic oligonucleotide
uccuagacaccagcauacatt

SEQ ID NO: 304 - DNA, 21 bp, Artificial Sequence
  Description of Artificial Sequence: Synthetic oligonucleotide
  Description of Combined DNA/RNA Molecule: Synthetic oligonucleotide
uguaugcuggugucuaggatt

SEQ ID NO: 305 - DNA, 21 bp, Artificial Sequence
  Description of Artificial Sequence: Synthetic oligonucleotide
  Description of Combined DNA/RNA Molecule: Synthetic oligonucleotide
ccuagacaccagcauacagtt

SEQ ID NO: 306 - DNA, 21 bp, Artificial Sequence
  Description of Artificial Sequence: Synthetic oligonucleotide
  Description of Combined DNA/RNA Molecule: Synthetic oligonucleotide
cuguaugcuggugucuaggtt

SEQ ID NO: 307 - DNA, 21 bp, Artificial Sequence
  Description of Artificial Sequence: Synthetic oligonucleotide
  Description of Combined DNA/RNA Molecule: Synthetic oligonucleotide
ccuagacaccagcauacagtt

SEQ ID NO: 308 - DNA, 21 bp, Artificial Sequence
  Description of Artificial Sequence: Synthetic oligonucleotide
  Description of Combined DNA/RNA Molecule: Synthetic oligonucleotide
cuguaugcuggugucuaggtt

SEQ ID NO: 309 - DNA, 21 bp, Artificial Sequence
  Description of Artificial Sequence: Synthetic oligonucleotide
  Description of Combined DNA/RNA Molecule: Synthetic oligonucleotide
gacaccagcauacagagugtt

SEQ ID NO: 310 - DNA, 21 bp, Artificial Sequence
  Description of Artificial Sequence: Synthetic oligonucleotide
  Description of Combined DNA/RNA Molecule: Synthetic oligonucleotide
cacucuguaugcugguguctt

SEQ ID NO: 311 - DNA, 21 bp, Artificial Sequence
  Description of Artificial Sequence: Synthetic oligonucleotide
  Description of Combined DNA/RNA Molecule: Synthetic oligonucleotide
gacaccagcauacagagugtt

SEQ ID NO: 312 - DNA, 21 bp, Artificial Sequence
  Description of Artificial Sequence: Synthetic oligonucleotide
  Description of Combined DNA/RNA Molecule: Synthetic oligonucleotide
cacucuguaugcugguguctt

SEQ ID NO: 313 - DNA, 21 bp, Artificial Sequence
  Description of Artificial Sequence: Synthetic oligonucleotide
  Description of Combined DNA/RNA Molecule: Synthetic oligonucleotide
cauacagagugaccaccggtt

SEQ ID NO: 314 - DNA, 21 bp, Artificial Sequence
  Description of Artificial Sequence: Synthetic oligonucleotide
  Description of Combined DNA/RNA Molecule: Synthetic oligonucleotide
ccgguggucacucuguaugtt

SEQ ID NO: 315 - DNA, 21 bp, Artificial Sequence
  Description of Artificial Sequence: Synthetic oligonucleotide
  Description of Combined DNA/RNA Molecule: Synthetic oligonucleotide
cauacagagugaccaccggtt

SEQ ID NO: 316 - DNA, 21 bp, Artificial Sequence
  Description of Artificial Sequence: Synthetic oligonucleotide
  Description of Combined DNA/RNA Molecule: Synthetic oligonucleotide
ccgguggucacucuguaugtt

SEQ ID NO: 317 - DNA, 21 bp, Artificial Sequence
  Description of Artificial Sequence: Synthetic oligonucleotide
  Description of Combined DNA/RNA Molecule: Synthetic oligonucleotide
agagugaccaccgggaaautt

SEQ ID NO: 318 - DNA, 21 bp, Artificial Sequence
  Description of Artificial Sequence: Synthetic oligonucleotide
  Description of Combined DNA/RNA Molecule: Synthetic oligonucleotide
auuucccgguggucacucutt

SEQ ID NO: 319 - DNA, 21 bp, Artificial Sequence
  Description of Artificial Sequence: Synthetic oligonucleotide
  Description of Combined DNA/RNA Molecule: Synthetic oligonucleotide
agagugaccaccgggaaautt

SEQ ID NO: 320 - DNA, 21 bp, Artificial Sequence
  Description of Artificial Sequence: Synthetic oligonucleotide
  Description of Combined DNA/RNA Molecule: Synthetic oligonucleotide
auuucccgguggucacucutt

SEQ ID NO: 321 - DNA, 21 bp, Artificial Sequence
  Description of Artificial Sequence: Synthetic oligonucleotide
  Description of Combined DNA/RNA Molecule: Synthetic oligonucleotide
gagugaccaccgggaaauctt

SEQ ID NO: 322 - DNA, 21 bp, Artificial Sequence
  Description of Artificial Sequence: Synthetic oligonucleotide
  Description of Combined DNA/RNA Molecule: Synthetic oligonucleotide
gauuucccgguggucacuctt

SEQ ID NO: 323 - DNA, 21 bp, Artificial Sequence
  Description of Artificial Sequence: Synthetic oligonucleotide
  Description of Combined DNA/RNA Molecule: Synthetic oligonucleotide
gagugaccaccgggaaauctt

SEQ ID NO: 324 - DNA, 21 bp, Artificial Sequence
  Description of Artificial Sequence: Synthetic oligonucleotide
  Description of Combined DNA/RNA Molecule: Synthetic oligonucleotide
gauuucccgguggucacuctt

SEQ ID NO: 325 - DNA, 21 bp, Artificial Sequence
  Description of Artificial Sequence: Synthetic oligonucleotide
  Description of Combined DNA/RNA Molecule: Synthetic oligonucleotide
gugaccaccgggaaaucgatt

SEQ ID NO: 326 - DNA, 21 bp, Artificial Sequence
  Description of Artificial Sequence: Synthetic oligonucleotide
  Description of Combined DNA/RNA Molecule: Synthetic oligonucleotide
ucgauuucccgguggucactt

SEQ ID NO: 327 - DNA, 21 bp, Artificial Sequence
  Description of Artificial Sequence: Synthetic oligonucleotide
  Description of Combined DNA/RNA Molecule: Synthetic oligonucleotide
gugaccaccgggaaaucgatt

SEQ ID NO: 328 - DNA, 21 bp, Artificial Sequence
  Description of Artificial Sequence: Synthetic oligonucleotide
  Description of Combined DNA/RNA Molecule: Synthetic oligonucleotide
ucgauuucccgguggucactt

SEQ ID NO: 329 - DNA, 21 bp, Artificial Sequence
  Description of Artificial Sequence: Synthetic oligonucleotide
  Description of Combined DNA/RNA Molecule: Synthetic oligonucleotide
gaccaccgggaaaucgaggtt

SEQ ID NO: 330 - DNA, 21 bp, Artificial Sequence
  Description of Artificial Sequence: Synthetic oligonucleotide
  Description of Combined DNA/RNA Molecule: Synthetic oligonucleotide
ccucgauuucccggugguctt

SEQ ID NO: 331 - DNA, 21 bp, Artificial Sequence
  Description of Artificial Sequence: Synthetic oligonucleotide
  Description of Combined DNA/RNA Molecule: Synthetic oligonucleotide
gaccaccgggaaaucgaggtt

SEQ ID NO: 332 - DNA, 21 bp, Artificial Sequence
  Description of Artificial Sequence: Synthetic oligonucleotide
  Description of Combined DNA/RNA Molecule: Synthetic oligonucleotide
ccucgauuucccggugguctt

SEQ ID NO: 333 - DNA, 21 bp, Artificial Sequence
  Description of Artificial Sequence: Synthetic oligonucleotide
  Description of Combined DNA/RNA Molecule: Synthetic oligonucleotide
accaccgggaaaucgagggtt

SEQ ID NO: 334 - DNA, 21 bp, Artificial Sequence
  Description of Artificial Sequence: Synthetic oligonucleotide
  Description of Combined DNA/RNA Molecule: Synthetic oligonucleotide
cccucgauuucccgguggutt

SEQ ID NO: 335 - DNA, 21 bp, Artificial Sequence
  Description of Artificial Sequence: Synthetic oligonucleotide
  Description of Combined DNA/RNA Molecule: Synthetic oligonucleotide
accaccgggaaaucgagggtt

SEQ ID NO: 336 - DNA, 21 bp, Artificial Sequence
  Description of Artificial Sequence: Synthetic oligonucleotide
  Description of Combined DNA/RNA Molecule: Synthetic oligonucleotide
cccucgauuucccgguggutt

SEQ ID NO: 337 - DNA, 21 bp, Artificial Sequence
  Description of Artificial Sequence: Synthetic oligonucleotide
  Description of Combined DNA/RNA Molecule: Synthetic oligonucleotide
ccaccgggaaaucgagggctt

SEQ ID NO: 338 - DNA, 21 bp, Artificial Sequence
  Description of Artificial Sequence: Synthetic oligonucleotide
  Description of Combined DNA/RNA Molecule: Synthetic oligonucleotide
gcccucgauuucccgguggtt

SEQ ID NO: 339 - DNA, 21 bp, Artificial Sequence
  Description of Artificial Sequence: Synthetic oligonucleotide
  Description of Combined DNA/RNA Molecule: Synthetic oligonucleotide
ccaccgggaaaucgagggctt

SEQ ID NO: 340 - DNA, 21 bp, Artificial Sequence
  Description of Artificial Sequence: Synthetic oligonucleotide
  Description of Combined DNA/RNA Molecule: Synthetic oligonucleotide
gcccucgauuucccgguggtt

SEQ ID NO: 341 - DNA, 21 bp, Artificial Sequence
  Description of Artificial Sequence: Synthetic oligonucleotide
  Description of Combined DNA/RNA Molecule: Synthetic oligonucleotide
aaaucgagggcagggucautt

SEQ ID NO: 342 - DNA, 21 bp, Artificial Sequence
  Description of Artificial Sequence: Synthetic oligonucleotide
  Description of Combined DNA/RNA Molecule: Synthetic oligonucleotide
augacccugcccucgauuutt

SEQ ID NO: 343 - DNA, 21 bp, Artificial Sequence
  Description of Artificial Sequence: Synthetic oligonucleotide
  Description of Combined DNA/RNA Molecule: Synthetic oligonucleotide
aaaucgagggcagggucautt

SEQ ID NO: 344 - DNA, 21 bp, Artificial Sequence
  Description of Artificial Sequence: Synthetic oligonucleotide
  Description of Combined DNA/RNA Molecule: Synthetic oligonucleotide
augacccugcccucgauuutt

SEQ ID NO: 345 - DNA, 21 bp, Artificial Sequence
  Description of Artificial Sequence: Synthetic oligonucleotide
  Description of Combined DNA/RNA Molecule: Synthetic oligonucleotide
aaaucgagggcagggucautt

SEQ ID NO: 346 - DNA, 21 bp, Artificial Sequence
  Description of Artificial Sequence: Synthetic oligonucleotide
  Description of Combined DNA/RNA Molecule: Synthetic oligonucleotide
augacccugcccucgauuutt

SEQ ID NO: 347 - DNA, 21 bp, Artificial Sequence
  Description of Artificial Sequence: Synthetic oligonucleotide
  Description of Combined DNA/RNA Molecule: Synthetic oligonucleotide
aaaucgagggcagggucautt

SEQ ID NO: 348 - DNA, 21 bp, Artificial Sequence
  Description of Artificial Sequence: Synthetic oligonucleotide
  Description of Combined DNA/RNA Molecule: Synthetic oligonucleotide
augacccugcccucgauuutt

SEQ ID NO: 349 - DNA, 21 bp, Artificial Sequence
  Description of Artificial Sequence: Synthetic oligonucleotide
  Description of Combined DNA/RNA Molecule: Synthetic oligonucleotide
aaaucgagggcagggucautt

SEQ ID NO: 350 - DNA, 21 bp, Artificial Sequence
  Description of Artificial Sequence: Synthetic oligonucleotide
  Description of Combined DNA/RNA Molecule: Synthetic oligonucleotide
augacccugcccucgauuutt

SEQ ID NO: 351 - DNA, 21 bp, Artificial Sequence
  Description of Artificial Sequence: Synthetic oligonucleotide
  Description of Combined DNA/RNA Molecule: Synthetic oligonucleotide
aaaucgagggcagggucautt

SEQ ID NO: 352 - DNA, 21 bp, Artificial Sequence
  Description of Artificial Sequence: Synthetic oligonucleotide
  Description of Combined DNA/RNA Molecule: Synthetic oligonucleotide
augacccugcccucgauuutt

SEQ ID NO: 353 - DNA, 21 bp, Artificial Sequence
  Description of Artificial Sequence: Synthetic oligonucleotide
  Description of Combined DNA/RNA Molecule: Synthetic oligonucleotide
aaaucgagggcagggucautt

SEQ ID NO: 354 - DNA, 21 bp, Artificial Sequence
  Description of Artificial Sequence: Synthetic oligonucleotide
  Description of Combined DNA/RNA Molecule: Synthetic oligonucleotide
augacccugcccucgauuutt

SEQ ID NO: 355 - DNA, 21 bp, Artificial Sequence
  Description of Artificial Sequence: Synthetic oligonucleotide
  Description of Combined DNA/RNA Molecule: Synthetic oligonucleotide
aaaucgagggcagggucautt

SEQ ID NO: 356 - DNA, 21 bp, Artificial Sequence
  Description of Artificial Sequence: Synthetic oligonucleotide
  Description of Combined DNA/RNA Molecule: Synthetic oligonucleotide
augacccugcccucgauuutt

SEQ ID NO: 357 - DNA, 21 bp, Artificial Sequence
  Description of Artificial Sequence: Synthetic oligonucleotide
  Description of Combined DNA/RNA Molecule: Synthetic oligonucleotide
aaaucgagggcagggucautt

SEQ ID NO: 358 - DNA, 21 bp, Artificial Sequence
  Description of Artificial Sequence: Synthetic oligonucleotide
  Description of Combined DNA/RNA Molecule: Synthetic oligonucleotide
augacccugcccucgauuutt

SEQ ID NO: 359 - DNA, 21 bp, Artificial Sequence
  Description of Artificial Sequence: Synthetic oligonucleotide
  Description of Combined DNA/RNA Molecule: Synthetic oligonucleotide
cggcacccucauaggccugtt

SEQ ID NO: 360 - DNA, 21 bp, Artificial Sequence
  Description of Artificial Sequence: Synthetic oligonucleotide
  Description of Combined DNA/RNA Molecule: Synthetic oligonucleotide
caggccuaugagggugccgtt

SEQ ID NO: 361 - DNA, 21 bp, Artificial Sequence
  Description of Artificial Sequence: Synthetic oligonucleotide
  Description of Combined DNA/RNA Molecule: Synthetic oligonucleotide
cggcacccucauaggccugtt

SEQ ID NO: 362 - DNA, 21 bp, Artificial Sequence
  Description of Artificial Sequence: Synthetic oligonucleotide
  Description of Combined DNA/RNA Molecule: Synthetic oligonucleotide
caggccuaugagggugccgtt

SEQ ID NO: 363 - DNA, 21 bp, Artificial Sequence
  Description of Artificial Sequence: Synthetic oligonucleotide
  Description of Combined DNA/RNA Molecule: Synthetic oligonucleotide
cggcacccucauaggccugtt

SEQ ID NO: 364 - DNA, 21 bp, Artificial Sequence
  Description of Artificial Sequence: Synthetic oligonucleotide
  Description of Combined DNA/RNA Molecule: Synthetic oligonucleotide
caggccuaugagggugccgtt

SEQ ID NO: 365 - DNA, 21 bp, Artificial Sequence
  Description of Artificial Sequence: Synthetic oligonucleotide
  Description of Combined DNA/RNA Molecule: Synthetic oligonucleotide
cggcacccucauaggccugtt

SEQ ID NO: 366 - DNA, 21 bp, Artificial Sequence
  Description of Artificial Sequence: Synthetic oligonucleotide
  Description of Combined DNA/RNA Molecule: Synthetic oligonucleotide
caggccuaugagggugccgtt

SEQ ID NO: 367 - DNA, 21 bp, Artificial Sequence
  Description of Artificial Sequence: Synthetic oligonucleotide
  Description of Combined DNA/RNA Molecule: Synthetic oligonucleotide
cggcacccucauaggccugtt

SEQ ID NO: 368 - DNA, 21 bp, Artificial Sequence
  Description of Artificial Sequence: Synthetic oligonucleotide
  Description of Combined DNA/RNA Molecule: Synthetic oligonucleotide
caggccuaugagggugccgtt

SEQ ID NO: 369 - DNA, 21 bp, Artificial Sequence
  Description of Artificial Sequence: Synthetic oligonucleotide
  Description of Combined DNA/RNA Molecule: Synthetic oligonucleotide
cggcacccucauaggccugtt

SEQ ID NO: 370 - DNA, 21 bp, Artificial Sequence
  Description of Artificial Sequence: Synthetic oligonucleotide
  Description of Combined DNA/RNA Molecule: Synthetic oligonucleotide
caggccuaugagggugccgtt

SEQ ID NO: 371 - DNA, 21 bp, Artificial Sequence
  Description of Artificial Sequence: Synthetic oligonucleotide
  Description of Combined DNA/RNA Molecule: Synthetic oligonucleotide
cggcacccucauaggccugtt

SEQ ID NO: 372 - DNA, 21 bp, Artificial Sequence
  Description of Artificial Sequence: Synthetic oligonucleotide
  Description of Combined DNA/RNA Molecule: Synthetic oligonucleotide
caggccuaugagggugccgtt

SEQ ID NO: 373 - DNA, 21 bp, Artificial Sequence
  Description of Artificial Sequence: Synthetic oligonucleotide
  Description of Combined DNA/RNA Molecule: Synthetic oligonucleotide
aucgagggcagggucauggtt

SEQ ID NO: 374 - DNA, 21 bp, Artificial Sequence
  Description of Artificial Sequence: Synthetic oligonucleotide
  Description of Combined DNA/RNA Molecule: Synthetic oligonucleotide
ccaugacccugcccucgautt

SEQ ID NO: 375 - DNA, 21 bp, Artificial Sequence
  Description of Artificial Sequence: Synthetic oligonucleotide
  Description of Combined DNA/RNA Molecule: Synthetic oligonucleotide
aucgagggcagggucauggtt

SEQ ID NO: 376 - DNA, 21 bp, Artificial Sequence
  Description of Artificial Sequence: Synthetic oligonucleotide
  Description of Combined DNA/RNA Molecule: Synthetic oligonucleotide
ccaugacccugcccucgautt

SEQ ID NO: 377 - DNA, 21 bp, Artificial Sequence
  Description of Artificial Sequence: Synthetic oligonucleotide
  Description of Combined DNA/RNA Molecule: Synthetic oligonucleotide
cgagggcagggucaugguctt

SEQ ID NO: 378 - DNA, 21 bp, Artificial Sequence
  Description of Artificial Sequence: Synthetic oligonucleotide
  Description of Combined DNA/RNA Molecule: Synthetic oligonucleotide
gaccaugacccugcccucgtt

SEQ ID NO: 379 - DNA, 21 bp, Artificial Sequence
  Description of Artificial Sequence: Synthetic oligonucleotide
  Description of Combined DNA/RNA Molecule: Synthetic oligonucleotide
gagggcagggucauggucatt

SEQ ID NO: 380 - DNA, 21 bp, Artificial Sequence
  Description of Artificial Sequence: Synthetic oligonucleotide
  Description of Combined DNA/RNA Molecule: Synthetic oligonucleotide
ugaccaugacccugcccuctt

SEQ ID NO: 381 - DNA, 21 bp, Artificial Sequence
  Description of Artificial Sequence: Synthetic oligonucleotide
  Description of Combined DNA/RNA Molecule: Synthetic oligonucleotide
gagggcagggucauggucatt

SEQ ID NO: 382 - DNA, 21 bp, Artificial Sequence
  Description of Artificial Sequence: Synthetic oligonucleotide
  Description of Combined DNA/RNA Molecule: Synthetic oligonucleotide
ugaccaugacccugcccuctt

SEQ ID NO: 383 - DNA, 21 bp, Artificial Sequence
  Description of Artificial Sequence: Synthetic oligonucleotide
  Description of Combined DNA/RNA Molecule: Synthetic oligonucleotide
gggcagggucauggucacctt

SEQ ID NO: 384 - DNA, 21 bp, Artificial Sequence
  Description of Artificial Sequence: Synthetic oligonucleotide
  Description of Combined DNA/RNA Molecule: Synthetic oligonucleotide
ggugaccaugacccugccctt

SEQ ID NO: 385 - DNA, 21 bp, Artificial Sequence
  Description of Artificial Sequence: Synthetic oligonucleotide
  Description of Combined DNA/RNA Molecule: Synthetic oligonucleotide
gggcagggucauggucacctt

SEQ ID NO: 386 - DNA, 21 bp, Artificial Sequence
  Description of Artificial Sequence: Synthetic oligonucleotide
  Description of Combined DNA/RNA Molecule: Synthetic oligonucleotide
ggugaccaugacccugccctt

SEQ ID NO: 387 - DNA, 21 bp, Artificial Sequence
  Description of Artificial Sequence: Synthetic oligonucleotide
  Description of Combined DNA/RNA Molecule: Synthetic oligonucleotide
cagggucauggucaccgactt

SEQ ID NO: 388 - DNA, 21 bp, Artificial Sequence
  Description of Artificial Sequence: Synthetic oligonucleotide
  Description of Combined DNA/RNA Molecule: Synthetic oligonucleotide
gucggugaccaugacccugtt

SEQ ID NO: 389 - DNA, 21 bp, Artificial Sequence
  Description of Artificial Sequence: Synthetic oligonucleotide
  Description of Combined DNA/RNA Molecule: Synthetic oligonucleotide
cagggucauggucaccgactt

SEQ ID NO: 390 - DNA, 21 bp, Artificial Sequence
  Description of Artificial Sequence: Synthetic oligonucleotide
  Description of Combined DNA/RNA Molecule: Synthetic oligonucleotide
gucggugaccaugacccugtt

SEQ ID NO: 391 - DNA, 21 bp, Artificial Sequence
  Description of Artificial Sequence: Synthetic oligonucleotide
  Description of Combined DNA/RNA Molecule: Synthetic oligonucleotide
agggucauggucaccgacutt

SEQ ID NO: 392 - DNA, 21 bp, Artificial Sequence
  Description of Artificial Sequence: Synthetic oligonucleotide
  Description of Combined DNA/RNA Molecule: Synthetic oligonucleotide
agucggugaccaugacccutt

SEQ ID NO: 393 - DNA, 21 bp, Artificial Sequence
  Description of Artificial Sequence: Synthetic oligonucleotide
  Description of Combined DNA/RNA Molecule: Synthetic oligonucleotide
agggucauggucaccgacutt

SEQ ID NO: 394 - DNA, 21 bp, Artificial Sequence
  Description of Artificial Sequence: Synthetic oligonucleotide
  Description of Combined DNA/RNA Molecule: Synthetic oligonucleotide
agucggugaccaugacccutt

SEQ ID NO: 395 - DNA, 21 bp, Artificial Sequence
  Description of Artificial Sequence: Synthetic oligonucleotide
  Description of Combined DNA/RNA Molecule: Synthetic oligonucleotide
auggucaccgacuucgagatt

SEQ ID NO: 396 - DNA, 21 bp, Artificial Sequence
  Description of Artificial Sequence: Synthetic oligonucleotide
  Description of Combined DNA/RNA Molecule: Synthetic oligonucleotide
ucucgaagucggugaccautt

SEQ ID NO: 397 - DNA, 21 bp, Artificial Sequence
  Description of Artificial Sequence: Synthetic oligonucleotide
  Description of Combined DNA/RNA Molecule: Synthetic oligonucleotide
auggucaccgacuucgagatt

SEQ ID NO: 398 - DNA, 21 bp, Artificial Sequence
  Description of Artificial Sequence: Synthetic oligonucleotide
  Description of Combined DNA/RNA Molecule: Synthetic oligonucleotide
ucucgaagucggugaccautt

SEQ ID NO: 399 - DNA, 21 bp, Artificial Sequence
  Description of Artificial Sequence: Synthetic oligonucleotide
  Description of Combined DNA/RNA Molecule: Synthetic oligonucleotide
ccgacuucgagaaugugcctt

SEQ ID NO: 400 - DNA, 21 bp, Artificial Sequence
  Description of Artificial Sequence: Synthetic oligonucleotide
  Description of Combined DNA/RNA Molecule: Synthetic oligonucleotide
ggcacauucucgaagucggtt

SEQ ID NO: 401 - DNA, 21 bp, Artificial Sequence
  Description of Artificial Sequence: Synthetic oligonucleotide
  Description of Combined DNA/RNA Molecule: Synthetic oligonucleotide
ggaggacgggacccgcuuctt

SEQ ID NO: 402 - DNA, 21 bp, Artificial Sequence
  Description of Artificial Sequence: Synthetic oligonucleotide
  Description of Combined DNA/RNA Molecule: Synthetic oligonucleotide
gaagcgggucccguccucctt

SEQ ID NO: 403 - DNA, 21 bp, Artificial Sequence
  Description of Artificial Sequence: Synthetic oligonucleotide
  Description of Combined DNA/RNA Molecule: Synthetic oligonucleotide
cagcggccgggaugccggctt

SEQ ID NO: 404 - DNA, 21 bp, Artificial Sequence
  Description of Artificial Sequence: Synthetic oligonucleotide
  Description of Combined DNA/RNA Molecule: Synthetic oligonucleotide
gccggcaucccggccgcugtt

SEQ ID NO: 405 - DNA, 21 bp, Artificial Sequence
  Description of Artificial Sequence: Synthetic oligonucleotide
  Description of Combined DNA/RNA Molecule: Synthetic oligonucleotide
cagcggccgggaugccggctt

SEQ ID NO: 406 - DNA, 21 bp, Artificial Sequence
  Description of Artificial Sequence: Synthetic oligonucleotide
  Description of Combined DNA/RNA Molecule: Synthetic oligonucleotide
gccggcaucccggccgcugtt

SEQ ID NO: 407 - DNA, 21 bp, Artificial Sequence
  Description of Artificial Sequence: Synthetic oligonucleotide
  Description of Combined DNA/RNA Molecule: Synthetic oligonucleotide
gggugccagcaugcgcagctt

SEQ ID NO: 408 - DNA, 21 bp, Artificial Sequence
  Description of Artificial Sequence: Synthetic oligonucleotide
  Description of Combined DNA/RNA Molecule: Synthetic oligonucleotide
gcugcgcaugcuggcaccctt

SEQ ID NO: 409 - DNA, 21 bp, Artificial Sequence
  Description of Artificial Sequence: Synthetic oligonucleotide
  Description of Combined DNA/RNA Molecule: Synthetic oligonucleotide
ccugcgcgugcucaacugctt

SEQ ID NO: 410 - DNA, 21 bp, Artificial Sequence
  Description of Artificial Sequence: Synthetic oligonucleotide
  Description of Combined DNA/RNA Molecule: Synthetic oligonucleotide
gcaguugagcacgcgcaggtt

SEQ ID NO: 411 - DNA, 21 bp, Artificial Sequence
  Description of Artificial Sequence: Synthetic oligonucleotide
  Description of Combined DNA/RNA Molecule: Synthetic oligonucleotide
ccugcgcgugcucaacugctt

SEQ ID NO: 412 - DNA, 21 bp, Artificial Sequence
  Description of Artificial Sequence: Synthetic oligonucleotide
  Description of Combined DNA/RNA Molecule: Synthetic oligonucleotide
gcaguugagcacgcgcaggtt

SEQ ID NO: 413 - DNA, 21 bp, Artificial Sequence
  Description of Artificial Sequence: Synthetic oligonucleotide
  Description of Combined DNA/RNA Molecule: Synthetic oligonucleotide
ugcgcgugcucaacugccatt

SEQ ID NO: 414 - DNA, 21 bp, Artificial Sequence
  Description of Artificial Sequence: Synthetic oligonucleotide
  Description of Combined DNA/RNA Molecule: Synthetic oligonucleotide
uggcaguugagcacgcgcatt

SEQ ID NO: 415 - DNA, 21 bp, Artificial Sequence
  Description of Artificial Sequence: Synthetic oligonucleotide
  Description of Combined DNA/RNA Molecule: Synthetic oligonucleotide
ugcgcgugcucaacugccatt

SEQ ID NO: 416 - DNA, 21 bp, Artificial Sequence
  Description of Artificial Sequence: Synthetic oligonucleotide
  Description of Combined DNA/RNA Molecule: Synthetic oligonucleotide
uggcaguugagcacgcgcatt

SEQ ID NO: 417 - DNA, 21 bp, Artificial Sequence
  Description of Artificial Sequence: Synthetic oligonucleotide
  Description of Combined DNA/RNA Molecule: Synthetic oligonucleotide
cgcgugcucaacugccaagtt

SEQ ID NO: 418 - DNA, 21 bp, Artificial Sequence
  Description of Artificial Sequence: Synthetic oligonucleotide
  Description of Combined DNA/RNA Molecule: Synthetic oligonucleotide
cuuggcaguugagcacgcgtt

SEQ ID NO: 419 - DNA, 21 bp, Artificial Sequence
  Description of Artificial Sequence: Synthetic oligonucleotide
  Description of Combined DNA/RNA Molecule: Synthetic oligonucleotide
cgcgugcucaacugccaagtt

SEQ ID NO: 420 - DNA, 21 bp, Artificial Sequence
  Description of Artificial Sequence: Synthetic oligonucleotide
  Description of Combined DNA/RNA Molecule: Synthetic oligonucleotide
cuuggcaguugagcacgcgtt

SEQ ID NO: 421 - DNA, 21 bp, Artificial Sequence
  Description of Artificial Sequence: Synthetic oligonucleotide
  Description of Combined DNA/RNA Molecule: Synthetic oligonucleotide
cugccaagggaagggcacgtt

SEQ ID NO: 422 - DNA, 21 bp, Artificial Sequence
  Description of Artificial Sequence: Synthetic oligonucleotide
  Description of Combined DNA/RNA Molecule: Synthetic oligonucleotide
cgugcccuucccuuggcagtt

SEQ ID NO: 423 - DNA, 21 bp, Artificial Sequence
  Description of Artificial Sequence: Synthetic oligonucleotide
  Description of Combined DNA/RNA Molecule: Synthetic oligonucleotide
cugccaagggaagggcacgtt

SEQ ID NO: 424 - DNA, 21 bp, Artificial Sequence
  Description of Artificial Sequence: Synthetic oligonucleotide
  Description of Combined DNA/RNA Molecule: Synthetic oligonucleotide
cgugcccuucccuuggcagtt

SEQ ID NO: 425 - DNA, 21 bp, Artificial Sequence
  Description of Artificial Sequence: Synthetic oligonucleotide
  Description of Combined DNA/RNA Molecule: Synthetic oligonucleotide
caagggaagggcacgguuatt

SEQ ID NO: 426 - DNA, 21 bp, Artificial Sequence
  Description of Artificial Sequence: Synthetic oligonucleotide
  Description of Combined DNA/RNA Molecule: Synthetic oligonucleotide
uaaccgugcccuucccuugtt

SEQ ID NO: 427 - DNA, 21 bp, Artificial Sequence
  Description of Artificial Sequence: Synthetic oligonucleotide
  Description of Combined DNA/RNA Molecule: Synthetic oligonucleotide
aagggaagggcacgguuagtt

SEQ ID NO: 428 - DNA, 21 bp, Artificial Sequence
  Description of Artificial Sequence: Synthetic oligonucleotide
  Description of Combined DNA/RNA Molecule: Synthetic oligonucleotide
cuaaccgugcccuucccuutt

SEQ ID NO: 429 - DNA, 21 bp, Artificial Sequence
  Description of Artificial Sequence: Synthetic oligonucleotide
  Description of Combined DNA/RNA Molecule: Synthetic oligonucleotide
agggaagggcacgguuagctt

SEQ ID NO: 430 - DNA, 21 bp, Artificial Sequence
  Description of Artificial Sequence: Synthetic oligonucleotide
  Description of Combined DNA/RNA Molecule: Synthetic oligonucleotide
gcuaaccgugcccuucccutt

SEQ ID NO: 431 - DNA, 21 bp, Artificial Sequence
  Description of Artificial Sequence: Synthetic oligonucleotide
  Description of Combined DNA/RNA Molecule: Synthetic oligonucleotide
gggaagggcacgguuagcgtt

SEQ ID NO: 432 - DNA, 21 bp, Artificial Sequence
  Description of Artificial Sequence: Synthetic oligonucleotide
  Description of Combined DNA/RNA Molecule: Synthetic oligonucleotide
cgcuaaccgugcccuuccctt

SEQ ID NO: 433 - DNA, 21 bp, Artificial Sequence
  Description of Artificial Sequence: Synthetic oligonucleotide
  Description of Combined DNA/RNA Molecule: Synthetic oligonucleotide
ggaagggcacgguuagcggtt

SEQ ID NO: 434 - DNA, 21 bp, Artificial Sequence
  Description of Artificial Sequence: Synthetic oligonucleotide
  Description of Combined DNA/RNA Molecule: Synthetic oligonucleotide
ccgcuaaccgugcccuucctt

SEQ ID NO: 435 - DNA, 21 bp, Artificial Sequence
  Description of Artificial Sequence: Synthetic oligonucleotide
  Description of Combined DNA/RNA Molecule: Synthetic oligonucleotide
gaagggcacgguuagcggctt

SEQ ID NO: 436 - DNA, 21 bp, Artificial Sequence
  Description of Artificial Sequence: Synthetic oligonucleotide
  Description of Combined DNA/RNA Molecule: Synthetic oligonucleotide
gccgcuaaccgugcccuuctt

SEQ ID NO: 437 - DNA, 21 bp, Artificial Sequence
  Description of Artificial Sequence: Synthetic oligonucleotide
  Description of Combined DNA/RNA Molecule: Synthetic oligonucleotide
aagggcacgguuagcggcatt

SEQ ID NO: 438 - DNA, 21 bp, Artificial Sequence
  Description of Artificial Sequence: Synthetic oligonucleotide
  Description of Combined DNA/RNA Molecule: Synthetic oligonucleotide
ugccgcuaaccgugcccuutt

SEQ ID NO: 439 - DNA, 21 bp, Artificial Sequence
  Description of Artificial Sequence: Synthetic oligonucleotide
  Description of Combined DNA/RNA Molecule: Synthetic oligonucleotide
agggcacgguuagcggcactt

SEQ ID NO: 440 - DNA, 21 bp, Artificial Sequence
  Description of Artificial Sequence: Synthetic oligonucleotide
  Description of Combined DNA/RNA Molecule: Synthetic oligonucleotide
gugccgcuaaccgugcccutt

SEQ ID NO: 441 - DNA, 21 bp, Artificial Sequence
  Description of Artificial Sequence: Synthetic oligonucleotide
  Description of Combined DNA/RNA Molecule: Synthetic oligonucleotide
cacgguuagcggcacccuctt

SEQ ID NO: 442 - DNA, 21 bp, Artificial Sequence
  Description of Artificial Sequence: Synthetic oligonucleotide
  Description of Combined DNA/RNA Molecule: Synthetic oligonucleotide
gagggugccgcuaaccgugtt

SEQ ID NO: 443 - DNA, 21 bp, Artificial Sequence
  Description of Artificial Sequence: Synthetic oligonucleotide
  Description of Combined DNA/RNA Molecule: Synthetic oligonucleotide
acgguuagcggcacccucatt

SEQ ID NO: 444 - DNA, 21 bp, Artificial Sequence
  Description of Artificial Sequence: Synthetic oligonucleotide
  Description of Combined DNA/RNA Molecule: Synthetic oligonucleotide
ugagggugccgcuaaccgutt

SEQ ID NO: 445 - DNA, 21 bp, Artificial Sequence
  Description of Artificial Sequence: Synthetic oligonucleotide
  Description of Combined DNA/RNA Molecule: Synthetic oligonucleotide
guuagcggcacccucauagtt

SEQ ID NO: 446 - DNA, 21 bp, Artificial Sequence
  Description of Artificial Sequence: Synthetic oligonucleotide
  Description of Combined DNA/RNA Molecule: Synthetic oligonucleotide
cuaugagggugccgcuaactt

SEQ ID NO: 447 - DNA, 21 bp, Artificial Sequence
  Description of Artificial Sequence: Synthetic oligonucleotide
  Description of Combined DNA/RNA Molecule: Synthetic oligonucleotide
uuagcggcacccucauaggtt

SEQ ID NO: 448 - DNA, 21 bp, Artificial Sequence
  Description of Artificial Sequence: Synthetic oligonucleotide
  Description of Combined DNA/RNA Molecule: Synthetic oligonucleotide
ccuaugagggugccgcuaatt

SEQ ID NO: 449 - DNA, 21 bp, Artificial Sequence
  Description of Artificial Sequence: Synthetic oligonucleotide
  Description of Combined DNA/RNA Molecule: Synthetic oligonucleotide
gcggcacccucauaggccutt

SEQ ID NO: 450 - DNA, 21 bp, Artificial Sequence
  Description of Artificial Sequence: Synthetic oligonucleotide
  Description of Combined DNA/RNA Molecule: Synthetic oligonucleotide
aggccuaugagggugccgctt

SEQ ID NO: 451 - DNA, 21 bp, Artificial Sequence
  Description of Artificial Sequence: Synthetic oligonucleotide
  Description of Combined DNA/RNA Molecule: Synthetic oligonucleotide
gcacccucauaggccuggatt

SEQ ID NO: 452 - DNA, 21 bp, Artificial Sequence
  Description of Artificial Sequence: Synthetic oligonucleotide
  Description of Combined DNA/RNA Molecule: Synthetic oligonucleotide
uccaggccuaugagggugctt

SEQ ID NO: 453 - DNA, 21 bp, Artificial Sequence
  Description of Artificial Sequence: Synthetic oligonucleotide
  Description of Combined DNA/RNA Molecule: Synthetic oligonucleotide
ucauaggccuggaguuuautt

SEQ ID NO: 454 - DNA, 21 bp, Artificial Sequence
  Description of Artificial Sequence: Synthetic oligonucleotide
  Description of Combined DNA/RNA Molecule: Synthetic oligonucleotide
auaaacuccaggccuaugatt

SEQ ID NO: 455 - DNA, 21 bp, Artificial Sequence
  Description of Artificial Sequence: Synthetic oligonucleotide
  Description of Combined DNA/RNA Molecule: Synthetic oligonucleotide
ggccuggaguuuauucggatt

SEQ ID NO: 456 - DNA, 21 bp, Artificial Sequence
  Description of Artificial Sequence: Synthetic oligonucleotide
  Description of Combined DNA/RNA Molecule: Synthetic oligonucleotide
uccgaauaaacuccaggcctt

SEQ ID NO: 457 - DNA, 21 bp, Artificial Sequence
  Description of Artificial Sequence: Synthetic oligonucleotide
  Description of Combined DNA/RNA Molecule: Synthetic oligonucleotide
gccuggaguuuauucggaatt

SEQ ID NO: 458 - DNA, 21 bp, Artificial Sequence
  Description of Artificial Sequence: Synthetic oligonucleotide
  Description of Combined DNA/RNA Molecule: Synthetic oligonucleotide
uuccgaauaaacuccaggctt

SEQ ID NO: 459 - DNA, 21 bp, Artificial Sequence
  Description of Artificial Sequence: Synthetic oligonucleotide
  Description of Combined DNA/RNA Molecule: Synthetic oligonucleotide
gccuggaguuuauucggaatt

SEQ ID NO: 460 - DNA, 21 bp, Artificial Sequence
  Description of Artificial Sequence: Synthetic oligonucleotide
  Description of Combined DNA/RNA Molecule: Synthetic oligonucleotide
uuccgaauaaacuccaggctt

SEQ ID NO: 461 - DNA, 21 bp, Artificial Sequence
  Description of Artificial Sequence: Synthetic oligonucleotide
  Description of Combined DNA/RNA Molecule: Synthetic oligonucleotide
gccuggaguuuauucggaatt

SEQ ID NO: 462 - DNA, 20 bp, Artificial Sequence
  Description of Artificial Sequence: Synthetic oligonucleotide
  Description of Combined DNA/RNA Molecule: Synthetic oligonucleotide
uuccgaauaacuccaggctt

SEQ ID NO: 463 - DNA, 21 bp, Artificial Sequence
  Description of Artificial Sequence: Synthetic oligonucleotide
  Description of Combined DNA/RNA Molecule: Synthetic oligonucleotide
cuggaguuuauucggaaaatt

SEQ ID NO: 464 - DNA, 21 bp, Artificial Sequence
  Description of Artificial Sequence: Synthetic oligonucleotide
  Description of Combined DNA/RNA Molecule: Synthetic oligonucleotide
uuuuccgaauaaacuccagtt

SEQ ID NO: 465 - DNA, 21 bp, Artificial Sequence
  Description of Artificial Sequence: Synthetic oligonucleotide
  Description of Combined DNA/RNA Molecule: Synthetic oligonucleotide
cuggaguuuauucggaaaatt

SEQ ID NO: 466 - DNA, 21 bp, Artificial Sequence
  Description of Artificial Sequence: Synthetic oligonucleotide
  Description of Combined DNA/RNA Molecule: Synthetic oligonucleotide
uuuuccgaauaaacuccagtt

SEQ ID NO: 467 - DNA, 21 bp, Artificial Sequence
  Description of Artificial Sequence: Synthetic oligonucleotide
  Description of Combined DNA/RNA Molecule: Synthetic oligonucleotide
ggaguuuauucggaaaagctt

SEQ ID NO: 468 - DNA, 21 bp, Artificial Sequence
  Description of Artificial Sequence: Synthetic oligonucleotide
  Description of Combined DNA/RNA Molecule: Synthetic oligonucleotide
gcuuuuccgaauaaacucctt

SEQ ID NO: 469 - DNA, 21 bp, Artificial Sequence
  Description of Artificial Sequence: Synthetic oligonucleotide
  Description of Combined DNA/RNA Molecule: Synthetic oligonucleotide
ggaguuuauucggaaaagctt

SEQ ID NO: 470 - DNA, 21 bp, Artificial Sequence
  Description of Artificial Sequence: Synthetic oligonucleotide
  Description of Combined DNA/RNA Molecule: Synthetic oligonucleotide
gcuuuuccgaauaaacucctt

SEQ ID NO: 471 - DNA, 21 bp, Artificial Sequence
  Description of Artificial Sequence: Synthetic oligonucleotide
  Description of Combined DNA/RNA Molecule: Synthetic oligonucleotide
gaguuuauucggaaaagcctt

SEQ ID NO: 472 - DNA, 21 bp, Artificial Sequence
  Description of Artificial Sequence: Synthetic oligonucleotide
  Description of Combined DNA/RNA Molecule: Synthetic oligonucleotide
ggcuuuuccgaauaaacuctt

SEQ ID NO: 473 - DNA, 21 bp, Artificial Sequence
  Description of Artificial Sequence: Synthetic oligonucleotide
  Description of Combined DNA/RNA Molecule: Synthetic oligonucleotide
gaguuuauucggaaaagcctt

SEQ ID NO: 474 - DNA, 21 bp, Artificial Sequence
  Description of Artificial Sequence: Synthetic oligonucleotide
  Description of Combined DNA/RNA Molecule: Synthetic oligonucleotide
ggcuuuuccgaauaaacuctt

SEQ ID NO: 475 - DNA, 21 bp, Artificial Sequence
  Description of Artificial Sequence: Synthetic oligonucleotide
  Description of Combined DNA/RNA Molecule: Synthetic oligonucleotide
uuauucggaaaagccagcutt

SEQ ID NO: 476 - DNA, 21 bp, Artificial Sequence
  Description of Artificial Sequence: Synthetic oligonucleotide
  Description of Combined DNA/RNA Molecule: Synthetic oligonucleotide
agcuggcuuuuccgaauaatt

SEQ ID NO: 477 - DNA, 21 bp, Artificial Sequence
  Description of Artificial Sequence: Synthetic oligonucleotide
  Description of Combined DNA/RNA Molecule: Synthetic oligonucleotide
uuauucggaaaagccagcutt

SEQ ID NO: 478 - DNA, 21 bp, Artificial Sequence
  Description of Artificial Sequence: Synthetic oligonucleotide
  Description of Combined DNA/RNA Molecule: Synthetic oligonucleotide
agcuggcuuuuccgaauaatt

SEQ ID NO: 479 - DNA, 21 bp, Artificial Sequence
  Description of Artificial Sequence: Synthetic oligonucleotide
  Description of Combined DNA/RNA Molecule: Synthetic oligonucleotide
cccuggcggguggguacagtt

SEQ ID NO: 480 - DNA, 21 bp, Artificial Sequence
  Description of Artificial Sequence: Synthetic oligonucleotide
  Description of Combined DNA/RNA Molecule: Synthetic oligonucleotide
cuguacccacccgccagggtt

SEQ ID NO: 481 - DNA, 21 bp, Artificial Sequence
  Description of Artificial Sequence: Synthetic oligonucleotide
  Description of Combined DNA/RNA Molecule: Synthetic oligonucleotide
cccuggcggguggguacagtt

SEQ ID NO: 482 - DNA, 21 bp, Artificial Sequence
  Description of Artificial Sequence: Synthetic oligonucleotide
  Description of Combined DNA/RNA Molecule: Synthetic oligonucleotide
cuguacccacccgccagggtt

SEQ ID NO: 483 - DNA, 21 bp, Artificial Sequence
  Description of Artificial Sequence: Synthetic oligonucleotide
  Description of Combined DNA/RNA Molecule: Synthetic oligonucleotide
ccuggcggguggguacagctt

SEQ ID NO: 484 - DNA, 21 bp, Artificial Sequence
  Description of Artificial Sequence: Synthetic oligonucleotide
  Description of Combined DNA/RNA Molecule: Synthetic oligonucleotide
gcuguacccacccgccaggtt

SEQ ID NO: 485 - DNA, 21 bp, Artificial Sequence
  Description of Artificial Sequence: Synthetic oligonucleotide
  Description of Combined DNA/RNA Molecule: Synthetic oligonucleotide
uggcggguggguacagccgtt

SEQ ID NO: 486 - DNA, 21 bp, Artificial Sequence
  Description of Artificial Sequence: Synthetic oligonucleotide
  Description of Combined DNA/RNA Molecule: Synthetic oligonucleotide
cggcuguacccacccgccatt

SEQ ID NO: 487 - DNA, 21 bp, Artificial Sequence
  Description of Artificial Sequence: Synthetic oligonucleotide
  Description of Combined DNA/RNA Molecule: Synthetic oligonucleotide
uggcggguggguacagccgtt

SEQ ID NO: 488 - DNA, 21 bp, Artificial Sequence
  Description of Artificial Sequence: Synthetic oligonucleotide
  Description of Combined DNA/RNA Molecule: Synthetic oligonucleotide
cggcuguacccacccgccatt

SEQ ID NO: 489 - DNA, 21 bp, Artificial Sequence
  Description of Artificial Sequence: Synthetic oligonucleotide
  Description of Combined DNA/RNA Molecule: Synthetic oligonucleotide
ggcggguggguacagccgctt

SEQ ID NO: 490 - DNA, 21 bp, Artificial Sequence
  Description of Artificial Sequence: Synthetic oligonucleotide
  Description of Combined DNA/RNA Molecule: Synthetic oligonucleotide
gcggcuguacccacccgcctt

SEQ ID NO: 491 - DNA, 21 bp, Artificial Sequence
  Description of Artificial Sequence: Synthetic oligonucleotide
  Description of Combined DNA/RNA Molecule: Synthetic oligonucleotide
gguggguacagccgcgucctt

SEQ ID NO: 492 - DNA, 21 bp, Artificial Sequence
  Description of Artificial Sequence: Synthetic oligonucleotide
  Description of Combined DNA/RNA Molecule: Synthetic oligonucleotide
ggacgcggcuguacccacctt

SEQ ID NO: 493 - DNA, 21 bp, Artificial Sequence
  Description of Artificial Sequence: Synthetic oligonucleotide
  Description of Combined DNA/RNA Molecule: Synthetic oligonucleotide
uggguacagccgcguccuctt

SEQ ID NO: 494 - DNA, 21 bp, Artificial Sequence
  Description of Artificial Sequence: Synthetic oligonucleotide
  Description of Combined DNA/RNA Molecule: Synthetic oligonucleotide
gaggacgcggcuguacccatt

SEQ ID NO: 495 - DNA, 21 bp, Artificial Sequence
  Description of Artificial Sequence: Synthetic oligonucleotide
  Description of Combined DNA/RNA Molecule: Synthetic oligonucleotide
gccgcguccucaacgccgctt

SEQ ID NO: 496 - DNA, 21 bp, Artificial Sequence
  Description of Artificial Sequence: Synthetic oligonucleotide
  Description of Combined DNA/RNA Molecule: Synthetic oligonucleotide
gcggcguugaggacgcggctt

SEQ ID NO: 497 - DNA, 21 bp, Artificial Sequence
  Description of Artificial Sequence: Synthetic oligonucleotide
  Description of Combined DNA/RNA Molecule: Synthetic oligonucleotide
ccgcguccucaacgccgcctt

SEQ ID NO: 498 - DNA, 21 bp, Artificial Sequence
  Description of Artificial Sequence: Synthetic oligonucleotide
  Description of Combined DNA/RNA Molecule: Synthetic oligonucleotide
ggcggcguugaggacgcggtt

SEQ ID NO: 499 - DNA, 21 bp, Artificial Sequence
  Description of Artificial Sequence: Synthetic oligonucleotide
  Description of Combined DNA/RNA Molecule: Synthetic oligonucleotide
gucgugcuggucaccgcugtt

SEQ ID NO: 500 - DNA, 21 bp, Artificial Sequence
  Description of Artificial Sequence: Synthetic oligonucleotide
  Description of Combined DNA/RNA Molecule: Synthetic oligonucleotide
cagcggugaccagcacgactt

SEQ ID NO: 501 - DNA, 21 bp, Artificial Sequence
  Description of Artificial Sequence: Synthetic oligonucleotide
  Description of Combined DNA/RNA Molecule: Synthetic oligonucleotide
gucgugcuggucaccgcugtt

SEQ ID NO: 502 - DNA, 21 bp, Artificial Sequence
  Description of Artificial Sequence: Synthetic oligonucleotide
  Description of Combined DNA/RNA Molecule: Synthetic oligonucleotide
cagcggugaccagcacgactt

SEQ ID NO: 503 - DNA, 21 bp, Artificial Sequence
  Description of Artificial Sequence: Synthetic oligonucleotide
  Description of Combined DNA/RNA Molecule: Synthetic oligonucleotide
ucgugcuggucaccgcugctt

SEQ ID NO: 504 - DNA, 21 bp, Artificial Sequence
  Description of Artificial Sequence: Synthetic oligonucleotide
  Description of Combined DNA/RNA Molecule: Synthetic oligonucleotide
gcagcggugaccagcacgatt

SEQ ID NO: 505 - DNA, 21 bp, Artificial Sequence
  Description of Artificial Sequence: Synthetic oligonucleotide
  Description of Combined DNA/RNA Molecule: Synthetic oligonucleotide
ucgugcuggucaccgcugctt

SEQ ID NO: 506 - DNA, 21 bp, Artificial Sequence
  Description of Artificial Sequence: Synthetic oligonucleotide
  Description of Combined DNA/RNA Molecule: Synthetic oligonucleotide
gcagcggugaccagcacgatt

SEQ ID NO: 507 - DNA, 21 bp, Artificial Sequence
  Description of Artificial Sequence: Synthetic oligonucleotide
  Description of Combined DNA/RNA Molecule: Synthetic oligonucleotide
uggucaccgcugccggcaatt

SEQ ID NO: 508 - DNA, 21 bp, Artificial Sequence
  Description of Artificial Sequence: Synthetic oligonucleotide
  Description of Combined DNA/RNA Molecule: Synthetic oligonucleotide
uugccggcagcggugaccatt

SEQ ID NO: 509 - DNA, 21 bp, Artificial Sequence
  Description of Artificial Sequence: Synthetic oligonucleotide
  Description of Combined DNA/RNA Molecule: Synthetic oligonucleotide
uggucaccgcugccggcaatt

SEQ ID NO: 510 - DNA, 21 bp, Artificial Sequence
  Description of Artificial Sequence: Synthetic oligonucleotide
  Description of Combined DNA/RNA Molecule: Synthetic oligonucleotide
uugccggcagcggugaccatt

SEQ ID NO: 511 - DNA, 21 bp, Artificial Sequence
  Description of Artificial Sequence: Synthetic oligonucleotide
  Description of Combined DNA/RNA Molecule: Synthetic oligonucleotide
ggucaccgcugccggcaactt

SEQ ID NO: 512 - DNA, 21 bp, Artificial Sequence
  Description of Artificial Sequence: Synthetic oligonucleotide
  Description of Combined DNA/RNA Molecule: Synthetic oligonucleotide
guugccggcagcggugacctt

SEQ ID NO: 513 - DNA, 21 bp, Artificial Sequence
  Description of Artificial Sequence: Synthetic oligonucleotide
  Description of Combined DNA/RNA Molecule: Synthetic oligonucleotide
ggucaccgcugccggcaactt

SEQ ID NO: 514 - DNA, 21 bp, Artificial Sequence
  Description of Artificial Sequence: Synthetic oligonucleotide
  Description of Combined DNA/RNA Molecule: Synthetic oligonucleotide
guugccggcagcggugacctt

SEQ ID NO: 515 - DNA, 21 bp, Artificial Sequence
  Description of Artificial Sequence: Synthetic oligonucleotide
  Description of Combined DNA/RNA Molecule: Synthetic oligonucleotide
caccgcugccggcaacuuctt

SEQ ID NO: 516 - DNA, 21 bp, Artificial Sequence
  Description of Artificial Sequence: Synthetic oligonucleotide
  Description of Combined DNA/RNA Molecule: Synthetic oligonucleotide
gaaguugccggcagcggugtt

SEQ ID NO: 517 - DNA, 21 bp, Artificial Sequence
  Description of Artificial Sequence: Synthetic oligonucleotide
  Description of Combined DNA/RNA Molecule: Synthetic oligonucleotide
caccgcugccggcaacuuctt

SEQ ID NO: 518 - DNA, 21 bp, Artificial Sequence
  Description of Artificial Sequence: Synthetic oligonucleotide
  Description of Combined DNA/RNA Molecule: Synthetic oligonucleotide
gaaguugccggcagcggugtt

SEQ ID NO: 519 - DNA, 21 bp, Artificial Sequence
  Description of Artificial Sequence: Synthetic oligonucleotide
  Description of Combined DNA/RNA Molecule: Synthetic oligonucleotide
ccgcugccggcaacuuccgtt

SEQ ID NO: 520 - DNA, 21 bp, Artificial Sequence
  Description of Artificial Sequence: Synthetic oligonucleotide
  Description of Combined DNA/RNA Molecule: Synthetic oligonucleotide
cggaaguugccggcagcggtt

SEQ ID NO: 521 - DNA, 21 bp, Artificial Sequence
  Description of Artificial Sequence: Synthetic oligonucleotide
  Description of Combined DNA/RNA Molecule: Synthetic oligonucleotide
ccgcugccggcaacuuccgtt

SEQ ID NO: 522 - DNA, 21 bp, Artificial Sequence
  Description of Artificial Sequence: Synthetic oligonucleotide
  Description of Combined DNA/RNA Molecule: Synthetic oligonucleotide
cggaaguugccggcagcggtt

SEQ ID NO: 523 - DNA, 21 bp, Artificial Sequence
  Description of Artificial Sequence: Synthetic oligonucleotide
  Description of Combined DNA/RNA Molecule: Synthetic oligonucleotide
cgcugccggcaacuuccggtt

SEQ ID NO: 524 - DNA, 21 bp, Artificial Sequence
  Description of Artificial Sequence: Synthetic oligonucleotide
  Description of Combined DNA/RNA Molecule: Synthetic oligonucleotide
ccggaaguugccggcagcgtt

SEQ ID NO: 525 - DNA, 21 bp, Artificial Sequence
  Description of Artificial Sequence: Synthetic oligonucleotide
  Description of Combined DNA/RNA Molecule: Synthetic oligonucleotide
cgcugccggcaacuuccggtt

SEQ ID NO: 526 - DNA, 21 bp, Artificial Sequence
  Description of Artificial Sequence: Synthetic oligonucleotide
  Description of Combined DNA/RNA Molecule: Synthetic oligonucleotide
ccggaaguugccggcagcgtt

SEQ ID NO: 527 - DNA, 21 bp, Artificial Sequence
  Description of Artificial Sequence: Synthetic oligonucleotide
  Description of Combined DNA/RNA Molecule: Synthetic oligonucleotide
gcugccggcaacuuccgggtt

SEQ ID NO: 528 - DNA, 21 bp, Artificial Sequence
  Description of Artificial Sequence: Synthetic oligonucleotide
  Description of Combined DNA/RNA Molecule: Synthetic oligonucleotide
cccggaaguugccggcagctt

SEQ ID NO: 529 - DNA, 21 bp, Artificial Sequence
  Description of Artificial Sequence: Synthetic oligonucleotide
  Description of Combined DNA/RNA Molecule: Synthetic oligonucleotide
gcugccggcaacuuccgggtt

SEQ ID NO: 530 - DNA, 21 bp, Artificial Sequence
  Description of Artificial Sequence: Synthetic oligonucleotide
  Description of Combined DNA/RNA Molecule: Synthetic oligonucleotide
cccggaaguugccggcagctt

SEQ ID NO: 531 - DNA, 21 bp, Artificial Sequence
  Description of Artificial Sequence: Synthetic oligonucleotide
  Description of Combined DNA/RNA Molecule: Synthetic oligonucleotide
cggcaacuuccgggacgautt

SEQ ID NO: 532 - DNA, 21 bp, Artificial Sequence
  Description of Artificial Sequence: Synthetic oligonucleotide
  Description of Combined DNA/RNA Molecule: Synthetic oligonucleotide
aucgucccggaaguugccgtt

SEQ ID NO: 533 - DNA, 21 bp, Artificial Sequence
  Description of Artificial Sequence: Synthetic oligonucleotide
  Description of Combined DNA/RNA Molecule: Synthetic oligonucleotide
cggcaacuuccgggacgautt

SEQ ID NO: 534 - DNA, 21 bp, Artificial Sequence
  Description of Artificial Sequence: Synthetic oligonucleotide
  Description of Combined DNA/RNA Molecule: Synthetic oligonucleotide
aucgucccggaaguugccgtt

SEQ ID NO: 535 - DNA, 21 bp, Artificial Sequence
  Description of Artificial Sequence: Synthetic oligonucleotide
  Description of Combined DNA/RNA Molecule: Synthetic oligonucleotide
ggcaacuuccgggacgaugtt

SEQ ID NO: 536 - DNA, 21 bp, Artificial Sequence
  Description of Artificial Sequence: Synthetic oligonucleotide
  Description of Combined DNA/RNA Molecule: Synthetic oligonucleotide
caucgucccggaaguugcctt

SEQ ID NO: 537 - DNA, 21 bp, Artificial Sequence
  Description of Artificial Sequence: Synthetic oligonucleotide
  Description of Combined DNA/RNA Molecule: Synthetic oligonucleotide
ggcaacuuccgggacgaugtt

SEQ ID NO: 538 - DNA, 21 bp, Artificial Sequence
  Description of Artificial Sequence: Synthetic oligonucleotide
  Description of Combined DNA/RNA Molecule: Synthetic oligonucleotide
caucgucccggaaguugcctt

SEQ ID NO: 539 - DNA, 21 bp, Artificial Sequence
  Description of Artificial Sequence: Synthetic oligonucleotide
  Description of Combined DNA/RNA Molecule: Synthetic oligonucleotide
uuccgggacgaugccugcctt

SEQ ID NO: 540 - DNA, 21 bp, Artificial Sequence
  Description of Artificial Sequence: Synthetic oligonucleotide
  Description of Combined DNA/RNA Molecule: Synthetic oligonucleotide
ggcaggcaucgucccggaatt

SEQ ID NO: 541 - DNA, 21 bp, Artificial Sequence
  Description of Artificial Sequence: Synthetic oligonucleotide
  Description of Combined DNA/RNA Molecule: Synthetic oligonucleotide
uuccgggacgaugccugcctt

SEQ ID NO: 542 - DNA, 21 bp, Artificial Sequence
  Description of Artificial Sequence: Synthetic oligonucleotide
  Description of Combined DNA/RNA Molecule: Synthetic oligonucleotide
ggcaggcaucgucccggaatt

SEQ ID NO: 543 - DNA, 21 bp, Artificial Sequence
  Description of Artificial Sequence: Synthetic oligonucleotide
  Description of Combined DNA/RNA Molecule: Synthetic oligonucleotide
ggacgaugccugccucuactt

SEQ ID NO: 544 - DNA, 21 bp, Artificial Sequence
  Description of Artificial Sequence: Synthetic oligonucleotide
  Description of Combined DNA/RNA Molecule: Synthetic oligonucleotide
guagaggcaggcaucgucctt

SEQ ID NO: 545 - DNA, 21 bp, Artificial Sequence
  Description of Artificial Sequence: Synthetic oligonucleotide
  Description of Combined DNA/RNA Molecule: Synthetic oligonucleotide
ggacgaugccugccucuactt

SEQ ID NO: 546 - DNA, 21 bp, Artificial Sequence
  Description of Artificial Sequence: Synthetic oligonucleotide
  Description of Combined DNA/RNA Molecule: Synthetic oligonucleotide
guagaggcaggcaucgucctt

SEQ ID NO: 547 - DNA, 21 bp, Artificial Sequence
  Description of Artificial Sequence: Synthetic oligonucleotide
  Description of Combined DNA/RNA Molecule: Synthetic oligonucleotide
ggacgaugccugccucuactt

SEQ ID NO: 548 - DNA, 21 bp, Artificial Sequence
  Description of Artificial Sequence: Synthetic oligonucleotide
  Description of Combined DNA/RNA Molecule: Synthetic oligonucleotide
guagaggcaggcaucgucctt

SEQ ID NO: 549 - DNA, 21 bp, Artificial Sequence
  Description of Artificial Sequence: Synthetic oligonucleotide
  Description of Combined DNA/RNA Molecule: Synthetic oligonucleotide
gcucccgaggucaucacagtt

SEQ ID NO: 550 - DNA, 21 bp, Artificial Sequence
  Description of Artificial Sequence: Synthetic oligonucleotide
  Description of Combined DNA/RNA Molecule: Synthetic oligonucleotide
cugugaugaccucgggagctt

SEQ ID NO: 551 - DNA, 21 bp, Artificial Sequence
  Description of Artificial Sequence: Synthetic oligonucleotide
  Description of Combined DNA/RNA Molecule: Synthetic oligonucleotide
cucccgaggucaucacagutt

SEQ ID NO: 552 - DNA, 21 bp, Artificial Sequence
  Description of Artificial Sequence: Synthetic oligonucleotide
  Description of Combined DNA/RNA Molecule: Synthetic oligonucleotide
acugugaugaccucgggagtt

SEQ ID NO: 553 - DNA, 21 bp, Artificial Sequence
  Description of Artificial Sequence: Synthetic oligonucleotide
  Description of Combined DNA/RNA Molecule: Synthetic oligonucleotide
ucccgaggucaucacaguutt

SEQ ID NO: 554 - DNA, 21 bp, Artificial Sequence
  Description of Artificial Sequence: Synthetic oligonucleotide
  Description of Combined DNA/RNA Molecule: Synthetic oligonucleotide
aacugugaugaccucgggatt

SEQ ID NO: 555 - DNA, 21 bp, Artificial Sequence
  Description of Artificial Sequence: Synthetic oligonucleotide
  Description of Combined DNA/RNA Molecule: Synthetic oligonucleotide
ccaagaccagccggugacctt

SEQ ID NO: 556 - DNA, 21 bp, Artificial Sequence
  Description of Artificial Sequence: Synthetic oligonucleotide
  Description of Combined DNA/RNA Molecule: Synthetic oligonucleotide
ggucaccggcuggucuuggtt

SEQ ID NO: 557 - DNA, 21 bp, Artificial Sequence
  Description of Artificial Sequence: Synthetic oligonucleotide
  Description of Combined DNA/RNA Molecule: Synthetic oligonucleotide
caagaccagccggugaccctt

SEQ ID NO: 558 - DNA, 21 bp, Artificial Sequence
  Description of Artificial Sequence: Synthetic oligonucleotide
  Description of Combined DNA/RNA Molecule: Synthetic oligonucleotide
gggucaccggcuggucuugtt

SEQ ID NO: 559 - DNA, 21 bp, Artificial Sequence
  Description of Artificial Sequence: Synthetic oligonucleotide
  Description of Combined DNA/RNA Molecule: Synthetic oligonucleotide
accaacuuuggccgcugugtt

SEQ ID NO: 560 - DNA, 21 bp, Artificial Sequence
  Description of Artificial Sequence: Synthetic oligonucleotide
  Description of Combined DNA/RNA Molecule: Synthetic oligonucleotide
cacagcggccaaaguuggutt

SEQ ID NO: 561 - DNA, 21 bp, Artificial Sequence
  Description of Artificial Sequence: Synthetic oligonucleotide
  Description of Combined DNA/RNA Molecule: Synthetic oligonucleotide
accaacuuuggccgcugugtt

SEQ ID NO: 562 - DNA, 21 bp, Artificial Sequence
  Description of Artificial Sequence: Synthetic oligonucleotide
  Description of Combined DNA/RNA Molecule: Synthetic oligonucleotide
cacagcggccaaaguuggutt

SEQ ID NO: 563 - DNA, 21 bp, Artificial Sequence
  Description of Artificial Sequence: Synthetic oligonucleotide
  Description of Combined DNA/RNA Molecule: Synthetic oligonucleotide
caacuuuggccgcugugugtt

SEQ ID NO: 564 - DNA, 21 bp, Artificial Sequence
  Description of Artificial Sequence: Synthetic oligonucleotide
  Description of Combined DNA/RNA Molecule: Synthetic oligonucleotide
cacacagcggccaaaguugtt

SEQ ID NO: 565 - DNA, 21 bp, Artificial Sequence
  Description of Artificial Sequence: Synthetic oligonucleotide
  Description of Combined DNA/RNA Molecule: Synthetic oligonucleotide
caacuuuggccgcugugugtt

SEQ ID NO: 566 - DNA, 21 bp, Artificial Sequence
  Description of Artificial Sequence: Synthetic oligonucleotide
  Description of Combined DNA/RNA Molecule: Synthetic oligonucleotide
cacacagcggccaaaguugtt

SEQ ID NO: 567 - DNA, 21 bp, Artificial Sequence
  Description of Artificial Sequence: Synthetic oligonucleotide
  Description of Combined DNA/RNA Molecule: Synthetic oligonucleotide
cgcuguguggaccucuuugtt

SEQ ID NO: 568 - DNA, 21 bp, Artificial Sequence
  Description of Artificial Sequence: Synthetic oligonucleotide
  Description of Combined DNA/RNA Molecule: Synthetic oligonucleotide
caaagagguccacacagcgtt

SEQ ID NO: 569 - DNA, 21 bp, Artificial Sequence
  Description of Artificial Sequence: Synthetic oligonucleotide
  Description of Combined DNA/RNA Molecule: Synthetic oligonucleotide
cgcuguguggaccucuuugtt

SEQ ID NO: 570 - DNA, 21 bp, Artificial Sequence
  Description of Artificial Sequence: Synthetic oligonucleotide
  Description of Combined DNA/RNA Molecule: Synthetic oligonucleotide
caaagagguccacacagcgtt

SEQ ID NO: 571 - DNA, 21 bp, Artificial Sequence
  Description of Artificial Sequence: Synthetic oligonucleotide
  Description of Combined DNA/RNA Molecule: Synthetic oligonucleotide
gacaucauuggugccuccatt

SEQ ID NO: 572 - DNA, 21 bp, Artificial Sequence
  Description of Artificial Sequence: Synthetic oligonucleotide
  Description of Combined DNA/RNA Molecule: Synthetic oligonucleotide
uggaggcaccaaugauguctt

SEQ ID NO: 573 - DNA, 21 bp, Artificial Sequence
  Description of Artificial Sequence: Synthetic oligonucleotide
  Description of Combined DNA/RNA Molecule: Synthetic oligonucleotide
gacaucauuggugccuccatt

SEQ ID NO: 574 - DNA, 21 bp, Artificial Sequence
  Description of Artificial Sequence: Synthetic oligonucleotide
  Description of Combined DNA/RNA Molecule: Synthetic oligonucleotide
uggaggcaccaaugauguctt

SEQ ID NO: 575 - DNA, 21 bp, Artificial Sequence
  Description of Artificial Sequence: Synthetic oligonucleotide
  Description of Combined DNA/RNA Molecule: Synthetic oligonucleotide
ucauuggugccuccagcgatt

SEQ ID NO: 576 - DNA, 21 bp, Artificial Sequence
  Description of Artificial Sequence: Synthetic oligonucleotide
  Description of Combined DNA/RNA Molecule: Synthetic oligonucleotide
ucgcuggaggcaccaaugatt

SEQ ID NO: 577 - DNA, 21 bp, Artificial Sequence
  Description of Artificial Sequence: Synthetic oligonucleotide
  Description of Combined DNA/RNA Molecule: Synthetic oligonucleotide
ucauuggugccuccagcgatt

SEQ ID NO: 578 - DNA, 21 bp, Artificial Sequence
  Description of Artificial Sequence: Synthetic oligonucleotide
  Description of Combined DNA/RNA Molecule: Synthetic oligonucleotide
ucgcuggaggcaccaaugatt

SEQ ID NO: 579 - DNA, 21 bp, Artificial Sequence
  Description of Artificial Sequence: Synthetic oligonucleotide
  Description of Combined DNA/RNA Molecule: Synthetic oligonucleotide
agcaccugcuuugugucactt

SEQ ID NO: 580 - DNA, 21 bp, Artificial Sequence
  Description of Artificial Sequence: Synthetic oligonucleotide
  Description of Combined DNA/RNA Molecule: Synthetic oligonucleotide
gugacacaaagcaggugcutt

SEQ ID NO: 581 - DNA, 21 bp, Artificial Sequence
  Description of Artificial Sequence: Synthetic oligonucleotide
  Description of Combined DNA/RNA Molecule: Synthetic oligonucleotide
agcaccugcuuugugucactt

SEQ ID NO: 582 - DNA, 21 bp, Artificial Sequence
  Description of Artificial Sequence: Synthetic oligonucleotide
  Description of Combined DNA/RNA Molecule: Synthetic oligonucleotide
gugacacaaagcaggugcutt

SEQ ID NO: 583 - DNA, 21 bp, Artificial Sequence
  Description of Artificial Sequence: Synthetic oligonucleotide
  Description of Combined DNA/RNA Molecule: Synthetic oligonucleotide
cacagagugggacaucacatt

SEQ ID NO: 584 - DNA, 21 bp, Artificial Sequence
  Description of Artificial Sequence: Synthetic oligonucleotide
  Description of Combined DNA/RNA Molecule: Synthetic oligonucleotide
ugugaugucccacucugugtt

SEQ ID NO: 585 - DNA, 21 bp, Artificial Sequence
  Description of Artificial Sequence: Synthetic oligonucleotide
  Description of Combined DNA/RNA Molecule: Synthetic oligonucleotide
augcugucugccgagccggtt

SEQ ID NO: 586 - DNA, 21 bp, Artificial Sequence
  Description of Artificial Sequence: Synthetic oligonucleotide
  Description of Combined DNA/RNA Molecule: Synthetic oligonucleotide
ccggcucggcagacagcautt

SEQ ID NO: 587 - DNA, 21 bp, Artificial Sequence
  Description of Artificial Sequence: Synthetic oligonucleotide
  Description of Combined DNA/RNA Molecule: Synthetic oligonucleotide
augcugucugccgagccggtt

SEQ ID NO: 588 - DNA, 21 bp, Artificial Sequence
  Description of Artificial Sequence: Synthetic oligonucleotide
  Description of Combined DNA/RNA Molecule: Synthetic oligonucleotide
ccggcucggcagacagcautt

SEQ ID NO: 589 - DNA, 21 bp, Artificial Sequence
  Description of Artificial Sequence: Synthetic oligonucleotide
  Description of Combined DNA/RNA Molecule: Synthetic oligonucleotide
gucugccgagccggagcuctt

SEQ ID NO: 590 - DNA, 21 bp, Artificial Sequence
  Description of Artificial Sequence: Synthetic oligonucleotide
  Description of Combined DNA/RNA Molecule: Synthetic oligonucleotide
gagcuccggcucggcagactt

SEQ ID NO: 591 - DNA, 21 bp, Artificial Sequence
  Description of Artificial Sequence: Synthetic oligonucleotide
  Description of Combined DNA/RNA Molecule: Synthetic oligonucleotide
gucugccgagccggagcuctt

SEQ ID NO: 592 - DNA, 21 bp, Artificial Sequence
  Description of Artificial Sequence: Synthetic oligonucleotide
  Description of Combined DNA/RNA Molecule: Synthetic oligonucleotide
gagcuccggcucggcagactt

SEQ ID NO: 593 - DNA, 21 bp, Artificial Sequence
  Description of Artificial Sequence: Synthetic oligonucleotide
  Description of Combined DNA/RNA Molecule: Synthetic oligonucleotide
guugaggcagagacugauctt

SEQ ID NO: 594 - DNA, 21 bp, Artificial Sequence
  Description of Artificial Sequence: Synthetic oligonucleotide
  Description of Combined DNA/RNA Molecule: Synthetic oligonucleotide
gaucagucucugccucaactt

SEQ ID NO: 595 - DNA, 21 bp, Artificial Sequence
  Description of Artificial Sequence: Synthetic oligonucleotide
  Description of Combined DNA/RNA Molecule: Synthetic oligonucleotide
guugaggcagagacugauctt

SEQ ID NO: 596 - DNA, 21 bp, Artificial Sequence
  Description of Artificial Sequence: Synthetic oligonucleotide
  Description of Combined DNA/RNA Molecule: Synthetic oligonucleotide
gaucagucucugccucaactt

SEQ ID NO: 597 - DNA, 21 bp, Artificial Sequence
  Description of Artificial Sequence: Synthetic oligonucleotide
  Description of Combined DNA/RNA Molecule: Synthetic oligonucleotide
gcagagacugauccacuuctt

SEQ ID NO: 598 - DNA, 21 bp, Artificial Sequence
  Description of Artificial Sequence: Synthetic oligonucleotide
  Description of Combined DNA/RNA Molecule: Synthetic oligonucleotide
gaaguggaucagucucugctt

SEQ ID NO: 599 - DNA, 21 bp, Artificial Sequence
  Description of Artificial Sequence: Synthetic oligonucleotide
  Description of Combined DNA/RNA Molecule: Synthetic oligonucleotide
gcagagacugauccacuuctt

SEQ ID NO: 600 - DNA, 21 bp, Artificial Sequence
  Description of Artificial Sequence: Synthetic oligonucleotide
  Description of Combined DNA/RNA Molecule: Synthetic oligonucleotide
gaaguggaucagucucugctt

SEQ ID NO: 601 - DNA, 21 bp, Artificial Sequence
  Description of Artificial Sequence: Synthetic oligonucleotide
  Description of Combined DNA/RNA Molecule: Synthetic oligonucleotide
agagacugauccacuucuctt

SEQ ID NO: 602 - DNA, 21 bp, Artificial Sequence
  Description of Artificial Sequence: Synthetic oligonucleotide
  Description of Combined DNA/RNA Molecule: Synthetic oligonucleotide
gagaaguggaucagucucutt

SEQ ID NO: 603 - DNA, 21 bp, Artificial Sequence
  Description of Artificial Sequence: Synthetic oligonucleotide
  Description of Combined DNA/RNA Molecule: Synthetic oligonucleotide
agagacugauccacuucuctt

SEQ ID NO: 604 - DNA, 21 bp, Artificial Sequence
  Description of Artificial Sequence: Synthetic oligonucleotide
  Description of Combined DNA/RNA Molecule: Synthetic oligonucleotide
gagaaguggaucagucucutt

SEQ ID NO: 605 - DNA, 21 bp, Artificial Sequence
  Description of Artificial Sequence: Synthetic oligonucleotide
  Description of Combined DNA/RNA Molecule: Synthetic oligonucleotide
uucucugccaaagaugucatt

SEQ ID NO: 606 - DNA, 21 bp, Artificial Sequence
  Description of Artificial Sequence: Synthetic oligonucleotide
  Description of Combined DNA/RNA Molecule: Synthetic oligonucleotide
ugacaucuuuggcagagaatt

SEQ ID NO: 607 - DNA, 21 bp, Artificial Sequence
  Description of Artificial Sequence: Synthetic oligonucleotide
  Description of Combined DNA/RNA Molecule: Synthetic oligonucleotide
uucucugccaaagaugucatt

SEQ ID NO: 608 - DNA, 21 bp, Artificial Sequence
  Description of Artificial Sequence: Synthetic oligonucleotide
  Description of Combined DNA/RNA Molecule: Synthetic oligonucleotide
ugacaucuuuggcagagaatt

SEQ ID NO: 609 - DNA, 21 bp, Artificial Sequence
  Description of Artificial Sequence: Synthetic oligonucleotide
  Description of Combined DNA/RNA Molecule: Synthetic oligonucleotide
cucugccaaagaugucauctt

SEQ ID NO: 610 - DNA, 21 bp, Artificial Sequence
  Description of Artificial Sequence: Synthetic oligonucleotide
  Description of Combined DNA/RNA Molecule: Synthetic oligonucleotide
gaugacaucuuuggcagagtt

SEQ ID NO: 611 - DNA, 21 bp, Artificial Sequence
  Description of Artificial Sequence: Synthetic oligonucleotide
  Description of Combined DNA/RNA Molecule: Synthetic oligonucleotide
cucugccaaagaugucauctt

SEQ ID NO: 612 - DNA, 21 bp, Artificial Sequence
  Description of Artificial Sequence: Synthetic oligonucleotide
  Description of Combined DNA/RNA Molecule: Synthetic oligonucleotide
gaugacaucuuuggcagagtt

SEQ ID NO: 613 - DNA, 21 bp, Artificial Sequence
  Description of Artificial Sequence: Synthetic oligonucleotide
  Description of Combined DNA/RNA Molecule: Synthetic oligonucleotide
cugaggaccagcggguacutt

SEQ ID NO: 614 - DNA, 21 bp, Artificial Sequence
  Description of Artificial Sequence: Synthetic oligonucleotide
  Description of Combined DNA/RNA Molecule: Synthetic oligonucleotide
aguacccgcugguccucagtt

SEQ ID NO: 615 - DNA, 21 bp, Artificial Sequence
  Description of Artificial Sequence: Synthetic oligonucleotide
  Description of Combined DNA/RNA Molecule: Synthetic oligonucleotide
cugaggaccagcggguacutt

SEQ ID NO: 616 - DNA, 21 bp, Artificial Sequence
  Description of Artificial Sequence: Synthetic oligonucleotide
  Description of Combined DNA/RNA Molecule: Synthetic oligonucleotide
aguacccgcugguccucagtt

SEQ ID NO: 617 - DNA, 21 bp, Artificial Sequence
  Description of Artificial Sequence: Synthetic oligonucleotide
  Description of Combined DNA/RNA Molecule: Synthetic oligonucleotide
ugaggaccagcggguacugtt

SEQ ID NO: 618 - DNA, 21 bp, Artificial Sequence
  Description of Artificial Sequence: Synthetic oligonucleotide
  Description of Combined DNA/RNA Molecule: Synthetic oligonucleotide
caguacccgcugguccucatt

SEQ ID NO: 619 - DNA, 21 bp, Artificial Sequence
  Description of Artificial Sequence: Synthetic oligonucleotide
  Description of Combined DNA/RNA Molecule: Synthetic oligonucleotide
ugaggaccagcggguacugtt

SEQ ID NO: 620 - DNA, 21 bp, Artificial Sequence
  Description of Artificial Sequence: Synthetic oligonucleotide
  Description of Combined DNA/RNA Molecule: Synthetic oligonucleotide
caguacccgcugguccucatt

SEQ ID NO: 621 - DNA, 21 bp, Artificial Sequence
  Description of Artificial Sequence: Synthetic oligonucleotide
  Description of Combined DNA/RNA Molecule: Synthetic oligonucleotide
acuguauggucagcacacutt

SEQ ID NO: 622 - DNA, 21 bp, Artificial Sequence
  Description of Artificial Sequence: Synthetic oligonucleotide
  Description of Combined DNA/RNA Molecule: Synthetic oligonucleotide
agugugcugaccauacagutt

SEQ ID NO: 623 - DNA, 21 bp, Artificial Sequence
  Description of Artificial Sequence: Synthetic oligonucleotide
  Description of Combined DNA/RNA Molecule: Synthetic oligonucleotide
uguauggucagcacacucgtt

SEQ ID NO: 624 - DNA, 21 bp, Artificial Sequence
  Description of Artificial Sequence: Synthetic oligonucleotide
  Description of Combined DNA/RNA Molecule: Synthetic oligonucleotide
cgagugugcugaccauacatt

SEQ ID NO: 625 - DNA, 21 bp, Artificial Sequence
  Description of Artificial Sequence: Synthetic oligonucleotide
  Description of Combined DNA/RNA Molecule: Synthetic oligonucleotide
guauggucagcacacucggtt

SEQ ID NO: 626 - DNA, 21 bp, Artificial Sequence
  Description of Artificial Sequence: Synthetic oligonucleotide
  Description of Combined DNA/RNA Molecule: Synthetic oligonucleotide
ccgagugugcugaccauactt

SEQ ID NO: 627 - DNA, 21 bp, Artificial Sequence
  Description of Artificial Sequence: Synthetic oligonucleotide
  Description of Combined DNA/RNA Molecule: Synthetic oligonucleotide
ggauggccacagccgucgctt

SEQ ID NO: 628 - DNA, 21 bp, Artificial Sequence
  Description of Artificial Sequence: Synthetic oligonucleotide
  Description of Combined DNA/RNA Molecule: Synthetic oligonucleotide
gcgacggcuguggccaucctt

SEQ ID NO: 629 - DNA, 21 bp, Artificial Sequence
  Description of Artificial Sequence: Synthetic oligonucleotide
  Description of Combined DNA/RNA Molecule: Synthetic oligonucleotide
gauggccacagccgucgcctt

SEQ ID NO: 630 - DNA, 21 bp, Artificial Sequence
  Description of Artificial Sequence: Synthetic oligonucleotide
  Description of Combined DNA/RNA Molecule: Synthetic oligonucleotide
ggcgacggcuguggccauctt

SEQ ID NO: 631 - DNA, 21 bp, Artificial Sequence
  Description of Artificial Sequence: Synthetic oligonucleotide
  Description of Combined DNA/RNA Molecule: Synthetic oligonucleotide
caagcuggucugccgggcctt

SEQ ID NO: 632 - DNA, 21 bp, Artificial Sequence
  Description of Artificial Sequence: Synthetic oligonucleotide
  Description of Combined DNA/RNA Molecule: Synthetic oligonucleotide
ggcccggcagaccagcuugtt

SEQ ID NO: 633 - DNA, 21 bp, Artificial Sequence
  Description of Artificial Sequence: Synthetic oligonucleotide
  Description of Combined DNA/RNA Molecule: Synthetic oligonucleotide
cugccgggcccacaacgcutt

SEQ ID NO: 634 - DNA, 21 bp, Artificial Sequence
  Description of Artificial Sequence: Synthetic oligonucleotide
  Description of Combined DNA/RNA Molecule: Synthetic oligonucleotide
agcguugugggcccggcagtt

SEQ ID NO: 635 - DNA, 21 bp, Artificial Sequence
  Description of Artificial Sequence: Synthetic oligonucleotide
  Description of Combined DNA/RNA Molecule: Synthetic oligonucleotide
cugccgggcccacaacgcutt

SEQ ID NO: 636 - DNA, 21 bp, Artificial Sequence
  Description of Artificial Sequence: Synthetic oligonucleotide
  Description of Combined DNA/RNA Molecule: Synthetic oligonucleotide
agcguugugggcccggcagtt

SEQ ID NO: 637 - DNA, 21 bp, Artificial Sequence
  Description of Artificial Sequence: Synthetic oligonucleotide
  Description of Combined DNA/RNA Molecule: Synthetic oligonucleotide
ugccgggcccacaacgcuutt

SEQ ID NO: 638 - DNA, 21 bp, Artificial Sequence
  Description of Artificial Sequence: Synthetic oligonucleotide
  Description of Combined DNA/RNA Molecule: Synthetic oligonucleotide
aagcguugugggcccggcatt

SEQ ID NO: 639 - DNA, 21 bp, Artificial Sequence
  Description of Artificial Sequence: Synthetic oligonucleotide
  Description of Combined DNA/RNA Molecule: Synthetic oligonucleotide
ugccgggcccacaacgcuutt

SEQ ID NO: 640 - DNA, 21 bp, Artificial Sequence
  Description of Artificial Sequence: Synthetic oligonucleotide
  Description of Combined DNA/RNA Molecule: Synthetic oligonucleotide
aagcguugugggcccggcatt

SEQ ID NO: 641 - DNA, 21 bp, Artificial Sequence
  Description of Artificial Sequence: Synthetic oligonucleotide
  Description of Combined DNA/RNA Molecule: Synthetic oligonucleotide
ccgggcccacaacgcuuuutt

SEQ ID NO: 642 - DNA, 21 bp, Artificial Sequence
  Description of Artificial Sequence: Synthetic oligonucleotide
  Description of Combined DNA/RNA Molecule: Synthetic oligonucleotide
aaaagcguugugggcccggtt

SEQ ID NO: 643 - DNA, 21 bp, Artificial Sequence
  Description of Artificial Sequence: Synthetic oligonucleotide
  Description of Combined DNA/RNA Molecule: Synthetic oligonucleotide
ccgggcccacaacgcuuuutt

SEQ ID NO: 644 - DNA, 21 bp, Artificial Sequence
  Description of Artificial Sequence: Synthetic oligonucleotide
  Description of Combined DNA/RNA Molecule: Synthetic oligonucleotide
aaaagcguugugggcccggtt

SEQ ID NO: 645 - DNA, 21 bp, Artificial Sequence
  Description of Artificial Sequence: Synthetic oligonucleotide
  Description of Combined DNA/RNA Molecule: Synthetic oligonucleotide
gggcccacaacgcuuuuggtt

SEQ ID NO: 646 - DNA, 21 bp, Artificial Sequence
  Description of Artificial Sequence: Synthetic oligonucleotide
  Description of Combined DNA/RNA Molecule: Synthetic oligonucleotide
ccaaaagcguugugggccctt

SEQ ID NO: 647 - DNA, 21 bp, Artificial Sequence
  Description of Artificial Sequence: Synthetic oligonucleotide
  Description of Combined DNA/RNA Molecule: Synthetic oligonucleotide
gggcccacaacgcuuuuggtt

SEQ ID NO: 648 - DNA, 21 bp, Artificial Sequence
  Description of Artificial Sequence: Synthetic oligonucleotide
  Description of Combined DNA/RNA Molecule: Synthetic oligonucleotide
ccaaaagcguugugggccctt

SEQ ID NO: 649 - DNA, 21 bp, Artificial Sequence
  Description of Artificial Sequence: Synthetic oligonucleotide
  Description of Combined DNA/RNA Molecule: Synthetic oligonucleotide
ggugagggugucuacgccatt

SEQ ID NO: 650 - DNA, 21 bp, Artificial Sequence
  Description of Artificial Sequence: Synthetic oligonucleotide
  Description of Combined DNA/RNA Molecule: Synthetic oligonucleotide
uggcguagacacccucacctt

SEQ ID NO: 651 - DNA, 21 bp, Artificial Sequence
  Description of Artificial Sequence: Synthetic oligonucleotide
  Description of Combined DNA/RNA Molecule: Synthetic oligonucleotide
ggugagggugucuacgccatt

SEQ ID NO: 652 - DNA, 21 bp, Artificial Sequence
  Description of Artificial Sequence: Synthetic oligonucleotide
  Description of Combined DNA/RNA Molecule: Synthetic oligonucleotide
uggcguagacacccucacctt

SEQ ID NO: 653 - DNA, 21 bp, Artificial Sequence
  Description of Artificial Sequence: Synthetic oligonucleotide
  Description of Combined DNA/RNA Molecule: Synthetic oligonucleotide
gagggugucuacgccauugtt

SEQ ID NO: 654 - DNA, 21 bp, Artificial Sequence
  Description of Artificial Sequence: Synthetic oligonucleotide
  Description of Combined DNA/RNA Molecule: Synthetic oligonucleotide
caauggcguagacacccuctt

SEQ ID NO: 655 - DNA, 21 bp, Artificial Sequence
  Description of Artificial Sequence: Synthetic oligonucleotide
  Description of Combined DNA/RNA Molecule: Synthetic oligonucleotide
gagggugucuacgccauugtt

SEQ ID NO: 656 - DNA, 21 bp, Artificial Sequence
  Description of Artificial Sequence: Synthetic oligonucleotide
  Description of Combined DNA/RNA Molecule: Synthetic oligonucleotide
caauggcguagacacccuctt

SEQ ID NO: 657 - DNA, 21 bp, Artificial Sequence
  Description of Artificial Sequence: Synthetic oligonucleotide
  Description of Combined DNA/RNA Molecule: Synthetic oligonucleotide
gccaggugcugccugcuactt

SEQ ID NO: 658 - DNA, 21 bp, Artificial Sequence
  Description of Artificial Sequence: Synthetic oligonucleotide
  Description of Combined DNA/RNA Molecule: Synthetic oligonucleotide
guagcaggcagcaccuggctt

SEQ ID NO: 659 - DNA, 21 bp, Artificial Sequence
  Description of Artificial Sequence: Synthetic oligonucleotide
  Description of Combined DNA/RNA Molecule: Synthetic oligonucleotide
gccaggugcugccugcuactt

SEQ ID NO: 660 - DNA, 21 bp, Artificial Sequence
  Description of Artificial Sequence: Synthetic oligonucleotide
  Description of Combined DNA/RNA Molecule: Synthetic oligonucleotide
guagcaggcagcaccuggctt

SEQ ID NO: 661 - DNA, 21 bp, Artificial Sequence
  Description of Artificial Sequence: Synthetic oligonucleotide
  Description of Combined DNA/RNA Molecule: Synthetic oligonucleotide
ccaggugcugccugcuacctt

SEQ ID NO: 662 - DNA, 21 bp, Artificial Sequence
  Description of Artificial Sequence: Synthetic oligonucleotide
  Description of Combined DNA/RNA Molecule: Synthetic oligonucleotide
gguagcaggcagcaccuggtt

SEQ ID NO: 663 - DNA, 21 bp, Artificial Sequence
  Description of Artificial Sequence: Synthetic oligonucleotide
  Description of Combined DNA/RNA Molecule: Synthetic oligonucleotide
ccaggugcugccugcuacctt

SEQ ID NO: 664 - DNA, 21 bp, Artificial Sequence
  Description of Artificial Sequence: Synthetic oligonucleotide
  Description of Combined DNA/RNA Molecule: Synthetic oligonucleotide
gguagcaggcagcaccuggtt

SEQ ID NO: 665 - DNA, 21 bp, Artificial Sequence
  Description of Artificial Sequence: Synthetic oligonucleotide
  Description of Combined DNA/RNA Molecule: Synthetic oligonucleotide
acccacaagccgccugugctt

SEQ ID NO: 666 - DNA, 21 bp, Artificial Sequence
  Description of Artificial Sequence: Synthetic oligonucleotide
  Description of Combined DNA/RNA Molecule: Synthetic oligonucleotide
gcacaggcggcuugugggutt

SEQ ID NO: 667 - DNA, 21 bp, Artificial Sequence
  Description of Artificial Sequence: Synthetic oligonucleotide
  Description of Combined DNA/RNA Molecule: Synthetic oligonucleotide
gugcugaggccacgagguctt

SEQ ID NO: 668 - DNA, 21 bp, Artificial Sequence
  Description of Artificial Sequence: Synthetic oligonucleotide
  Description of Combined DNA/RNA Molecule: Synthetic oligonucleotide
gaccucguggccucagcactt

SEQ ID NO: 669 - DNA, 21 bp, Artificial Sequence
  Description of Artificial Sequence: Synthetic oligonucleotide
  Description of Combined DNA/RNA Molecule: Synthetic oligonucleotide
gugcugaggccacgagguctt

SEQ ID NO: 670 - DNA, 21 bp, Artificial Sequence
  Description of Artificial Sequence: Synthetic oligonucleotide
  Description of Combined DNA/RNA Molecule: Synthetic oligonucleotide
gaccucguggccucagcactt

SEQ ID NO: 671 - DNA, 21 bp, Artificial Sequence
  Description of Artificial Sequence: Synthetic oligonucleotide
  Description of Combined DNA/RNA Molecule: Synthetic oligonucleotide
ugcugaggccacgaggucatt

SEQ ID NO: 672 - DNA, 21 bp, Artificial Sequence
  Description of Artificial Sequence: Synthetic oligonucleotide
  Description of Combined DNA/RNA Molecule: Synthetic oligonucleotide
ugaccucguggccucagcatt

SEQ ID NO: 673 - DNA, 21 bp, Artificial Sequence
  Description of Artificial Sequence: Synthetic oligonucleotide
  Description of Combined DNA/RNA Molecule: Synthetic oligonucleotide
ugcugaggccacgaggucatt

SEQ ID NO: 674 - DNA, 21 bp, Artificial Sequence
  Description of Artificial Sequence: Synthetic oligonucleotide
  Description of Combined DNA/RNA Molecule: Synthetic oligonucleotide
ugaccucguggccucagcatt

SEQ ID NO: 675 - DNA, 21 bp, Artificial Sequence
  Description of Artificial Sequence: Synthetic oligonucleotide
  Description of Combined DNA/RNA Molecule: Synthetic oligonucleotide
ugcugaggccacgaggucatt

SEQ ID NO: 676 - DNA, 21 bp, Artificial Sequence
  Description of Artificial Sequence: Synthetic oligonucleotide
  Description of Combined DNA/RNA Molecule: Synthetic oligonucleotide
ugaccucguggccucagcatt

SEQ ID NO: 677 - DNA, 21 bp, Artificial Sequence
  Description of Artificial Sequence: Synthetic oligonucleotide
  Description of Combined DNA/RNA Molecule: Synthetic oligonucleotide
ugcugaggccacgaggucatt

SEQ ID NO: 678 - DNA, 21 bp, Artificial Sequence
  Description of Artificial Sequence: Synthetic oligonucleotide
  Description of Combined DNA/RNA Molecule: Synthetic oligonucleotide
ugaccucguggccucagcatt

SEQ ID NO: 679 - DNA, 21 bp, Artificial Sequence
  Description of Artificial Sequence: Synthetic oligonucleotide
  Description of Combined DNA/RNA Molecule: Synthetic oligonucleotide
ugcugaggccacgaggucatt

SEQ ID NO: 680 - DNA, 21 bp, Artificial Sequence
  Description of Artificial Sequence: Synthetic oligonucleotide
  Description of Combined DNA/RNA Molecule: Synthetic oligonucleotide
ugaccucguggccucagcatt

SEQ ID NO: 681 - DNA, 21 bp, Artificial Sequence
  Description of Artificial Sequence: Synthetic oligonucleotide
  Description of Combined DNA/RNA Molecule: Synthetic oligonucleotide
ugcugaggccacgaggucatt

SEQ ID NO: 682 - DNA, 21 bp, Artificial Sequence
  Description of Artificial Sequence: Synthetic oligonucleotide
  Description of Combined DNA/RNA Molecule: Synthetic oligonucleotide
ugaccucguggccucagcatt

SEQ ID NO: 683 - DNA, 21 bp, Artificial Sequence
  Description of Artificial Sequence: Synthetic oligonucleotide
  Description of Combined DNA/RNA Molecule: Synthetic oligonucleotide
ugcugaggccacgaggucatt

SEQ ID NO: 684 - DNA, 21 bp, Artificial Sequence
  Description of Artificial Sequence: Synthetic oligonucleotide
  Description of Combined DNA/RNA Molecule: Synthetic oligonucleotide
ugaccucguggccucagcatt

SEQ ID NO: 685 - DNA, 21 bp, Artificial Sequence
  Description of Artificial Sequence: Synthetic oligonucleotide
  Description of Combined DNA/RNA Molecule: Synthetic oligonucleotide
ugcugaggccacgaggucatt

SEQ ID NO: 686 - DNA, 21 bp, Artificial Sequence
  Description of Artificial Sequence: Synthetic oligonucleotide
  Description of Combined DNA/RNA Molecule: Synthetic oligonucleotide
ugaccucguggccucagcatt

SEQ ID NO: 687 - DNA, 21 bp, Artificial Sequence
  Description of Artificial Sequence: Synthetic oligonucleotide
  Description of Combined DNA/RNA Molecule: Synthetic oligonucleotide
ugcugaggccacgaggucatt

SEQ ID NO: 688 - DNA, 21 bp, Artificial Sequence
  Description of Artificial Sequence: Synthetic oligonucleotide
  Description of Combined DNA/RNA Molecule: Synthetic oligonucleotide
ugaccucguggccucagcatt

SEQ ID NO: 689 - DNA, 21 bp, Artificial Sequence
  Description of Artificial Sequence: Synthetic oligonucleotide
  Description of Combined DNA/RNA Molecule: Synthetic oligonucleotide
ugcugaggccacgaggucatt

SEQ ID NO: 690 - DNA, 21 bp, Artificial Sequence
  Description of Artificial Sequence: Synthetic oligonucleotide
  Description of Combined DNA/RNA Molecule: Synthetic oligonucleotide
ugaccucguggccucagcatt

SEQ ID NO: 691 - DNA, 21 bp, Artificial Sequence
  Description of Artificial Sequence: Synthetic oligonucleotide
  Description of Combined DNA/RNA Molecule: Synthetic oligonucleotide
guggucagcggccgggaugtt

SEQ ID NO: 692 - DNA, 21 bp, Artificial Sequence
  Description of Artificial Sequence: Synthetic oligonucleotide
  Description of Combined DNA/RNA Molecule: Synthetic oligonucleotide
caucccggccgcugaccactt

SEQ ID NO: 693 - DNA, 21 bp, Artificial Sequence
  Description of Artificial Sequence: Synthetic oligonucleotide
  Description of Combined DNA/RNA Molecule: Synthetic oligonucleotide
guggucagcggccgggaugtt

SEQ ID NO: 694 - DNA, 21 bp, Artificial Sequence
  Description of Artificial Sequence: Synthetic oligonucleotide
  Description of Combined DNA/RNA Molecule: Synthetic oligonucleotide
caucccggccgcugaccactt

SEQ ID NO: 695 - DNA, 21 bp, Artificial Sequence
  Description of Artificial Sequence: Synthetic oligonucleotide
  Description of Combined DNA/RNA Molecule: Synthetic oligonucleotide
guggucagcggccgggaugtt

SEQ ID NO: 696 - DNA, 21 bp, Artificial Sequence
  Description of Artificial Sequence: Synthetic oligonucleotide
  Description of Combined DNA/RNA Molecule: Synthetic oligonucleotide
caucccggccgcugaccactt

SEQ ID NO: 697 - DNA, 21 bp, Artificial Sequence
  Description of Artificial Sequence: Synthetic oligonucleotide
  Description of Combined DNA/RNA Molecule: Synthetic oligonucleotide
guggucagcggccgggaugtt

SEQ ID NO: 698 - DNA, 21 bp, Artificial Sequence
  Description of Artificial Sequence: Synthetic oligonucleotide
  Description of Combined DNA/RNA Molecule: Synthetic oligonucleotide
caucccggccgcugaccactt

SEQ ID NO: 699 - DNA, 21 bp, Artificial Sequence
  Description of Artificial Sequence: Synthetic oligonucleotide
  Description of Combined DNA/RNA Molecule: Synthetic oligonucleotide
guggucagcggccgggaugtt

SEQ ID NO: 700 - DNA, 21 bp, Artificial Sequence
  Description of Artificial Sequence: Synthetic oligonucleotide
  Description of Combined DNA/RNA Molecule: Synthetic oligonucleotide
caucccggccgcugaccactt

SEQ ID NO: 701 - DNA, 21 bp, Artificial Sequence
  Description of Artificial Sequence: Synthetic oligonucleotide
  Description of Combined DNA/RNA Molecule: Synthetic oligonucleotide
guggucagcggccgggaugtt

SEQ ID NO: 702 - DNA, 21 bp, Artificial Sequence
  Description of Artificial Sequence: Synthetic oligonucleotide
  Description of Combined DNA/RNA Molecule: Synthetic oligonucleotide
caucccggccgcugaccactt

SEQ ID NO: 703 - DNA, 21 bp, Artificial Sequence
  Description of Artificial Sequence: Synthetic oligonucleotide
  Description of Combined DNA/RNA Molecule: Synthetic oligonucleotide
guggucagcggccgggaugtt

SEQ ID NO: 704 - DNA, 21 bp, Artificial Sequence
  Description of Artificial Sequence: Synthetic oligonucleotide
  Description of Combined DNA/RNA Molecule: Synthetic oligonucleotide
caucccggccgcugaccactt

SEQ ID NO: 705 - DNA, 21 bp, Artificial Sequence
  Description of Artificial Sequence: Synthetic oligonucleotide
  Description of Combined DNA/RNA Molecule: Synthetic oligonucleotide
ggccacgaggucagcccaatt

SEQ ID NO: 706 - DNA, 21 bp, Artificial Sequence
  Description of Artificial Sequence: Synthetic oligonucleotide
  Description of Combined DNA/RNA Molecule: Synthetic oligonucleotide
uugggcugaccucguggcctt

SEQ ID NO: 707 - DNA, 21 bp, Artificial Sequence
  Description of Artificial Sequence: Synthetic oligonucleotide
  Description of Combined DNA/RNA Molecule: Synthetic oligonucleotide
cgaggucagcccaaccagutt

SEQ ID NO: 708 - DNA, 21 bp, Artificial Sequence
  Description of Artificial Sequence: Synthetic oligonucleotide
  Description of Combined DNA/RNA Molecule: Synthetic oligonucleotide
acugguugggcugaccucgtt

SEQ ID NO: 709 - DNA, 21 bp, Artificial Sequence
  Description of Artificial Sequence: Synthetic oligonucleotide
  Description of Combined DNA/RNA Molecule: Synthetic oligonucleotide
gucagcccaaccagugcgutt

SEQ ID NO: 710 - DNA, 21 bp, Artificial Sequence
  Description of Artificial Sequence: Synthetic oligonucleotide
  Description of Combined DNA/RNA Molecule: Synthetic oligonucleotide
acgcacugguugggcugactt

SEQ ID NO: 711 - DNA, 21 bp, Artificial Sequence
  Description of Artificial Sequence: Synthetic oligonucleotide
  Description of Combined DNA/RNA Molecule: Synthetic oligonucleotide
cagcccaaccagugcguggtt

SEQ ID NO: 712 - DNA, 21 bp, Artificial Sequence
  Description of Artificial Sequence: Synthetic oligonucleotide
  Description of Combined DNA/RNA Molecule: Synthetic oligonucleotide
ccacgcacugguugggcugtt

SEQ ID NO: 713 - DNA, 21 bp, Artificial Sequence
  Description of Artificial Sequence: Synthetic oligonucleotide
  Description of Combined DNA/RNA Molecule: Synthetic oligonucleotide
cacagggaggccagcaucctt

SEQ ID NO: 714 - DNA, 21 bp, Artificial Sequence
  Description of Artificial Sequence: Synthetic oligonucleotide
  Description of Combined DNA/RNA Molecule: Synthetic oligonucleotide
ggaugcuggccucccugugtt

SEQ ID NO: 715 - DNA, 21 bp, Artificial Sequence
  Description of Artificial Sequence: Synthetic oligonucleotide
  Description of Combined DNA/RNA Molecule: Synthetic oligonucleotide
ccagcauccacgcuuccugtt

SEQ ID NO: 716 - DNA, 21 bp, Artificial Sequence
  Description of Artificial Sequence: Synthetic oligonucleotide
  Description of Combined DNA/RNA Molecule: Synthetic oligonucleotide
caggaagcguggaugcuggtt

SEQ ID NO: 717 - DNA, 21 bp, Artificial Sequence
  Description of Artificial Sequence: Synthetic oligonucleotide
  Description of Combined DNA/RNA Molecule: Synthetic oligonucleotide
ccagcauccacgcuuccugtt

SEQ ID NO: 718 - DNA, 21 bp, Artificial Sequence
  Description of Artificial Sequence: Synthetic oligonucleotide
  Description of Combined DNA/RNA Molecule: Synthetic oligonucleotide
caggaagcguggaugcuggtt

SEQ ID NO: 719 - DNA, 21 bp, Artificial Sequence
  Description of Artificial Sequence: Synthetic oligonucleotide
  Description of Combined DNA/RNA Molecule: Synthetic oligonucleotide
agucaaggagcauggaauctt

SEQ ID NO: 720 - DNA, 21 bp, Artificial Sequence
  Description of Artificial Sequence: Synthetic oligonucleotide
  Description of Combined DNA/RNA Molecule: Synthetic oligonucleotide
gauuccaugcuccuugacutt

SEQ ID NO: 721 - DNA, 21 bp, Artificial Sequence
  Description of Artificial Sequence: Synthetic oligonucleotide
  Description of Combined DNA/RNA Molecule: Synthetic oligonucleotide
agucaaggagcauggaauctt

SEQ ID NO: 722 - DNA, 21 bp, Artificial Sequence
  Description of Artificial Sequence: Synthetic oligonucleotide
  Description of Combined DNA/RNA Molecule: Synthetic oligonucleotide
gauuccaugcuccuugacutt

SEQ ID NO: 723 - DNA, 21 bp, Artificial Sequence
  Description of Artificial Sequence: Synthetic oligonucleotide
  Description of Combined DNA/RNA Molecule: Synthetic oligonucleotide
agucaaggagcauggaauctt

SEQ ID NO: 724 - DNA, 21 bp, Artificial Sequence
  Description of Artificial Sequence: Synthetic oligonucleotide
  Description of Combined DNA/RNA Molecule: Synthetic oligonucleotide
gauuccaugcuccuugacutt

SEQ ID NO: 725 - DNA, 21 bp, Artificial Sequence
  Description of Artificial Sequence: Synthetic oligonucleotide
  Description of Combined DNA/RNA Molecule: Synthetic oligonucleotide
agucaaggagcauggaauctt

SEQ ID NO: 726 - DNA, 21 bp, Artificial Sequence
  Description of Artificial Sequence: Synthetic oligonucleotide
  Description of Combined DNA/RNA Molecule: Synthetic oligonucleotide
gauuccaugcuccuugacutt

SEQ ID NO: 727 - DNA, 21 bp, Artificial Sequence
  Description of Artificial Sequence: Synthetic oligonucleotide
  Description of Combined DNA/RNA Molecule: Synthetic oligonucleotide
agucaaggagcauggaauctt

SEQ ID NO: 728 - DNA, 21 bp, Artificial Sequence
  Description of Artificial Sequence: Synthetic oligonucleotide
  Description of Combined DNA/RNA Molecule: Synthetic oligonucleotide
gauuccaugcuccuugacutt

SEQ ID NO: 729 - DNA, 21 bp, Artificial Sequence
  Description of Artificial Sequence: Synthetic oligonucleotide
  Description of Combined DNA/RNA Molecule: Synthetic oligonucleotide
agucaaggagcauggaauctt

SEQ ID NO: 730 - DNA, 21 bp, Artificial Sequence
  Description of Artificial Sequence: Synthetic oligonucleotide
  Description of Combined DNA/RNA Molecule: Synthetic oligonucleotide
gauuccaugcuccuugacutt

SEQ ID NO: 731 - DNA, 21 bp, Artificial Sequence
  Description of Artificial Sequence: Synthetic oligonucleotide
  Description of Combined DNA/RNA Molecule: Synthetic oligonucleotide
agucaaggagcauggaauctt

SEQ ID NO: 732 - DNA, 21 bp, Artificial Sequence
  Description of Artificial Sequence: Synthetic oligonucleotide
  Description of Combined DNA/RNA Molecule: Synthetic oligonucleotide
gauuccaugcuccuugacutt

SEQ ID NO: 733 - DNA, 21 bp, Artificial Sequence
  Description of Artificial Sequence: Synthetic oligonucleotide
  Description of Combined DNA/RNA Molecule: Synthetic oligonucleotide
agucaaggagcauggaauctt

SEQ ID NO: 734 - DNA, 21 bp, Artificial Sequence
  Description of Artificial Sequence: Synthetic oligonucleotide
  Description of Combined DNA/RNA Molecule: Synthetic oligonucleotide
gauuccaugcuccuugacutt

SEQ ID NO: 735 - DNA, 21 bp, Artificial Sequence
  Description of Artificial Sequence: Synthetic oligonucleotide
  Description of Combined DNA/RNA Molecule: Synthetic oligonucleotide
agucaaggagcauggaauctt

SEQ ID NO: 736 - DNA, 21 bp, Artificial Sequence
  Description of Artificial Sequence: Synthetic oligonucleotide
  Description of Combined DNA/RNA Molecule: Synthetic oligonucleotide
gauuccaugcuccuugacutt

SEQ ID NO: 737 - DNA, 21 bp, Artificial Sequence
  Description of Artificial Sequence: Synthetic oligonucleotide
  Description of Combined DNA/RNA Molecule: Synthetic oligonucleotide
gcggcacccucauaggccutt

SEQ ID NO: 738 - DNA, 21 bp, Artificial Sequence
  Description of Artificial Sequence: Synthetic oligonucleotide
  Description of Combined DNA/RNA Molecule: Synthetic oligonucleotide
aggccuaugagggugccgctt

SEQ ID NO: 739 - DNA, 21 bp, Artificial Sequence
  Description of Artificial Sequence: Synthetic oligonucleotide
  Description of Combined DNA/RNA Molecule: Synthetic oligonucleotide
gcggcacccucauaggccutt

SEQ ID NO: 740 - DNA, 21 bp, Artificial Sequence
  Description of Artificial Sequence: Synthetic oligonucleotide
  Description of Combined DNA/RNA Molecule: Synthetic oligonucleotide
aggccuaugagggugccgctt

SEQ ID NO: 741 - DNA, 21 bp, Artificial Sequence
  Description of Artificial Sequence: Synthetic oligonucleotide
  Description of Combined DNA/RNA Molecule: Synthetic oligonucleotide
gcggcacccucauaggccutt

SEQ ID NO: 742 - DNA, 21 bp, Artificial Sequence
  Description of Artificial Sequence: Synthetic oligonucleotide
  Description of Combined DNA/RNA Molecule: Synthetic oligonucleotide
aggccuaugagggugccgctt

SEQ ID NO: 743 - DNA, 21 bp, Artificial Sequence
  Description of Artificial Sequence: Synthetic oligonucleotide
  Description of Combined DNA/RNA Molecule: Synthetic oligonucleotide
gcggcacccucauaggccutt

SEQ ID NO: 744 - DNA, 21 bp, Artificial Sequence
  Description of Artificial Sequence: Synthetic oligonucleotide
  Description of Combined DNA/RNA Molecule: Synthetic oligonucleotide
aggccuaugagggugccgctt

SEQ ID NO: 745 - DNA, 21 bp, Artificial Sequence
  Description of Artificial Sequence: Synthetic oligonucleotide
  Description of Combined DNA/RNA Molecule: Synthetic oligonucleotide
gcggcacccucauaggccutt

SEQ ID NO: 746 - DNA, 21 bp, Artificial Sequence
  Description of Artificial Sequence: Synthetic oligonucleotide
  Description of Combined DNA/RNA Molecule: Synthetic oligonucleotide
aggccuaugagggugccgctt

SEQ ID NO: 747 - DNA, 21 bp, Artificial Sequence
  Description of Artificial Sequence: Synthetic oligonucleotide
  Description of Combined DNA/RNA Molecule: Synthetic oligonucleotide
gcggcacccucauaggccutt

SEQ ID NO: 748 - DNA, 21 bp, Artificial Sequence
  Description of Artificial Sequence: Synthetic oligonucleotide
  Description of Combined DNA/RNA Molecule: Synthetic oligonucleotide
aggccuaugagggugccgctt

SEQ ID NO: 749 - DNA, 21 bp, Artificial Sequence
  Description of Artificial Sequence: Synthetic oligonucleotide
  Description of Combined DNA/RNA Molecule: Synthetic oligonucleotide
gcggcacccucauaggccutt

SEQ ID NO: 750 - DNA, 21 bp, Artificial Sequence
  Description of Artificial Sequence: Synthetic oligonucleotide
  Description of Combined DNA/RNA Molecule: Synthetic oligonucleotide
aggccuaugagggugccgctt

SEQ ID NO: 751 - DNA, 21 bp, Artificial Sequence
  Description of Artificial Sequence: Synthetic oligonucleotide
  Description of Combined DNA/RNA Molecule: Synthetic oligonucleotide
aaggagcauggaaucccggtt

SEQ ID NO: 752 - DNA, 21 bp, Artificial Sequence
  Description of Artificial Sequence: Synthetic oligonucleotide
  Description of Combined DNA/RNA Molecule: Synthetic oligonucleotide
ccgggauuccaugcuccuutt

SEQ ID NO: 753 - DNA, 21 bp, Artificial Sequence
  Description of Artificial Sequence: Synthetic oligonucleotide
  Description of Combined DNA/RNA Molecule: Synthetic oligonucleotide
aaggagcauggaaucccggtt

SEQ ID NO: 754 - DNA, 21 bp, Artificial Sequence
  Description of Artificial Sequence: Synthetic oligonucleotide
  Description of Combined DNA/RNA Molecule: Synthetic oligonucleotide
ccgggauuccaugcuccuutt

SEQ ID NO: 755 - DNA, 21 bp, Artificial Sequence
  Description of Artificial Sequence: Synthetic oligonucleotide
  Description of Combined DNA/RNA Molecule: Synthetic oligonucleotide
aggagcauggaaucccggctt

SEQ ID NO: 756 - DNA, 21 bp, Artificial Sequence
  Description of Artificial Sequence: Synthetic oligonucleotide
  Description of Combined DNA/RNA Molecule: Synthetic oligonucleotide
gccgggauuccaugcuccutt

SEQ ID NO: 757 - DNA, 21 bp, Artificial Sequence
  Description of Artificial Sequence: Synthetic oligonucleotide
  Description of Combined DNA/RNA Molecule: Synthetic oligonucleotide
aggagcauggaaucccggctt

SEQ ID NO: 758 - DNA, 21 bp, Artificial Sequence
  Description of Artificial Sequence: Synthetic oligonucleotide
  Description of Combined DNA/RNA Molecule: Synthetic oligonucleotide
gccgggauuccaugcuccutt

SEQ ID NO: 759 - DNA, 21 bp, Artificial Sequence
  Description of Artificial Sequence: Synthetic oligonucleotide
  Description of Combined DNA/RNA Molecule: Synthetic oligonucleotide
gagcauggaaucccggccctt

SEQ ID NO: 760 - DNA, 21 bp, Artificial Sequence
  Description of Artificial Sequence: Synthetic oligonucleotide
  Description of Combined DNA/RNA Molecule: Synthetic oligonucleotide
gggccgggauuccaugcuctt

SEQ ID NO: 761 - DNA, 21 bp, Artificial Sequence
  Description of Artificial Sequence: Synthetic oligonucleotide
  Description of Combined DNA/RNA Molecule: Synthetic oligonucleotide
gagcauggaaucccggccctt

SEQ ID NO: 762 - DNA, 21 bp, Artificial Sequence
  Description of Artificial Sequence: Synthetic oligonucleotide
  Description of Combined DNA/RNA Molecule: Synthetic oligonucleotide
gggccgggauuccaugcuctt

SEQ ID NO: 763 - DNA, 21 bp, Artificial Sequence
  Description of Artificial Sequence: Synthetic oligonucleotide
  Description of Combined DNA/RNA Molecule: Synthetic oligonucleotide
gccuacgccguagacaacatt

SEQ ID NO: 764 - DNA, 21 bp, Artificial Sequence
  Description of Artificial Sequence: Synthetic oligonucleotide
  Description of Combined DNA/RNA Molecule: Synthetic oligonucleotide
uguugucuacggcguaggctt

SEQ ID NO: 765 - DNA, 21 bp, Artificial Sequence
  Description of Artificial Sequence: Synthetic oligonucleotide
  Description of Combined DNA/RNA Molecule: Synthetic oligonucleotide
ccuacgccguagacaacactt

SEQ ID NO: 766 - DNA, 21 bp, Artificial Sequence
  Description of Artificial Sequence: Synthetic oligonucleotide
  Description of Combined DNA/RNA Molecule: Synthetic oligonucleotide
guguugucuacggcguaggtt

SEQ ID NO: 767 - DNA, 21 bp, Artificial Sequence
  Description of Artificial Sequence: Synthetic oligonucleotide
  Description of Combined DNA/RNA Molecule: Synthetic oligonucleotide
cuacgccguagacaacacgtt

SEQ ID NO: 768 - DNA, 21 bp, Artificial Sequence
  Description of Artificial Sequence: Synthetic oligonucleotide
  Description of Combined DNA/RNA Molecule: Synthetic oligonucleotide
cguguugucuacggcguagtt

SEQ ID NO: 769 - DNA, 21 bp, Artificial Sequence
  Description of Artificial Sequence: Synthetic oligonucleotide
  Description of Combined DNA/RNA Molecule: Synthetic oligonucleotide
uacgccguagacaacacgutt

SEQ ID NO: 770 - DNA, 21 bp, Artificial Sequence
  Description of Artificial Sequence: Synthetic oligonucleotide
  Description of Combined DNA/RNA Molecule: Synthetic oligonucleotide
acguguugucuacggcguatt

SEQ ID NO: 771 - DNA, 21 bp, Artificial Sequence
  Description of Artificial Sequence: Synthetic oligonucleotide
  Description of Combined DNA/RNA Molecule: Synthetic oligonucleotide
cgccguagacaacacgugutt

SEQ ID NO: 772 - DNA, 21 bp, Artificial Sequence
  Description of Artificial Sequence: Synthetic oligonucleotide
  Description of Combined DNA/RNA Molecule: Synthetic oligonucleotide
acacguguugucuacggcgtt

SEQ ID NO: 773 - DNA, 21 bp, Artificial Sequence
  Description of Artificial Sequence: Synthetic oligonucleotide
  Description of Combined DNA/RNA Molecule: Synthetic oligonucleotide
gccguagacaacacgugugtt

SEQ ID NO: 774 - DNA, 21 bp, Artificial Sequence
  Description of Artificial Sequence: Synthetic oligonucleotide
  Description of Combined DNA/RNA Molecule: Synthetic oligonucleotide
cacacguguugucuacggctt

SEQ ID NO: 775 - DNA, 21 bp, Artificial Sequence
  Description of Artificial Sequence: Synthetic oligonucleotide
  Description of Combined DNA/RNA Molecule: Synthetic oligonucleotide
ccguagacaacacgugugutt

SEQ ID NO: 776 - DNA, 21 bp, Artificial Sequence
  Description of Artificial Sequence: Synthetic oligonucleotide
  Description of Combined DNA/RNA Molecule: Synthetic oligonucleotide
acacacguguugucuacggtt

SEQ ID NO: 777 - DNA, 21 bp, Artificial Sequence
  Description of Artificial Sequence: Synthetic oligonucleotide
  Description of Combined DNA/RNA Molecule: Synthetic oligonucleotide
cguagacaacacguguguatt

SEQ ID NO: 778 - DNA, 21 bp, Artificial Sequence
  Description of Artificial Sequence: Synthetic oligonucleotide
  Description of Combined DNA/RNA Molecule: Synthetic oligonucleotide
uacacacguguugucuacgtt

SEQ ID NO: 779 - DNA, 21 bp, Artificial Sequence
  Description of Artificial Sequence: Synthetic oligonucleotide
  Description of Combined DNA/RNA Molecule: Synthetic oligonucleotide
uagacaacacguguguagutt

SEQ ID NO: 780 - DNA, 21 bp, Artificial Sequence
  Description of Artificial Sequence: Synthetic oligonucleotide
  Description of Combined DNA/RNA Molecule: Synthetic oligonucleotide
acuacacacguguugucuatt

SEQ ID NO: 781 - DNA, 21 bp, Artificial Sequence
  Description of Artificial Sequence: Synthetic oligonucleotide
  Description of Combined DNA/RNA Molecule: Synthetic oligonucleotide
agacaacacguguguaguctt

SEQ ID NO: 782 - DNA, 21 bp, Artificial Sequence
  Description of Artificial Sequence: Synthetic oligonucleotide
  Description of Combined DNA/RNA Molecule: Synthetic oligonucleotide
gacuacacacguguugucutt

SEQ ID NO: 783 - DNA, 21 bp, Artificial Sequence
  Description of Artificial Sequence: Synthetic oligonucleotide
  Description of Combined DNA/RNA Molecule: Synthetic oligonucleotide
gacaacacguguguagucatt

SEQ ID NO: 784 - DNA, 21 bp, Artificial Sequence
  Description of Artificial Sequence: Synthetic oligonucleotide
  Description of Combined DNA/RNA Molecule: Synthetic oligonucleotide
ugacuacacacguguuguctt

SEQ ID NO: 785 - DNA, 21 bp, Artificial Sequence
  Description of Artificial Sequence: Synthetic oligonucleotide
  Description of Combined DNA/RNA Molecule: Synthetic oligonucleotide
acaacacguguguagucagtt

SEQ ID NO: 786 - DNA, 21 bp, Artificial Sequence
  Description of Artificial Sequence: Synthetic oligonucleotide
  Description of Combined DNA/RNA Molecule: Synthetic oligonucleotide
cugacuacacacguguugutt

SEQ ID NO: 787 - DNA, 21 bp, Artificial Sequence
  Description of Artificial Sequence: Synthetic oligonucleotide
  Description of Combined DNA/RNA Molecule: Synthetic oligonucleotide
caacacguguguagucaggtt

SEQ ID NO: 788 - DNA, 21 bp, Artificial Sequence
  Description of Artificial Sequence: Synthetic oligonucleotide
  Description of Combined DNA/RNA Molecule: Synthetic oligonucleotide
ccugacuacacacguguugtt

SEQ ID NO: 789 - DNA, 21 bp, Artificial Sequence
  Description of Artificial Sequence: Synthetic oligonucleotide
  Description of Combined DNA/RNA Molecule: Synthetic oligonucleotide
cacguguguagucaggagctt

SEQ ID NO: 790 - DNA, 21 bp, Artificial Sequence
  Description of Artificial Sequence: Synthetic oligonucleotide
  Description of Combined DNA/RNA Molecule: Synthetic oligonucleotide
gcuccugacuacacacgugtt

SEQ ID NO: 791 - DNA, 21 bp, Artificial Sequence
  Description of Artificial Sequence: Synthetic oligonucleotide
  Description of Combined DNA/RNA Molecule: Synthetic oligonucleotide
acguguguagucaggagcctt

SEQ ID NO: 792 - DNA, 21 bp, Artificial Sequence
  Description of Artificial Sequence: Synthetic oligonucleotide
  Description of Combined DNA/RNA Molecule: Synthetic oligonucleotide
ggcuccugacuacacacgutt

SEQ ID NO: 793 - DNA, 21 bp, Artificial Sequence
  Description of Artificial Sequence: Synthetic oligonucleotide
  Description of Combined DNA/RNA Molecule: Synthetic oligonucleotide
cguguguagucaggagccgtt

SEQ ID NO: 794 - DNA, 21 bp, Artificial Sequence
  Description of Artificial Sequence: Synthetic oligonucleotide
  Description of Combined DNA/RNA Molecule: Synthetic oligonucleotide
cggcuccugacuacacacgtt

SEQ ID NO: 795 - DNA, 21 bp, Artificial Sequence
  Description of Artificial Sequence: Synthetic oligonucleotide
  Description of Combined DNA/RNA Molecule: Synthetic oligonucleotide
uguguagucaggagccgggtt

SEQ ID NO: 796 - DNA, 21 bp, Artificial Sequence
  Description of Artificial Sequence: Synthetic oligonucleotide
  Description of Combined DNA/RNA Molecule: Synthetic oligonucleotide
cccggcuccugacuacacatt

SEQ ID NO: 797 - DNA, 21 bp, Artificial Sequence
  Description of Artificial Sequence: Synthetic oligonucleotide
  Description of Combined DNA/RNA Molecule: Synthetic oligonucleotide
gucaggagccgggacgucatt

SEQ ID NO: 798 - DNA, 21 bp, Artificial Sequence
  Description of Artificial Sequence: Synthetic oligonucleotide
  Description of Combined DNA/RNA Molecule: Synthetic oligonucleotide
ugacgucccggcuccugactt

SEQ ID NO: 799 - DNA, 21 bp, Artificial Sequence
  Description of Artificial Sequence: Synthetic oligonucleotide
  Description of Combined DNA/RNA Molecule: Synthetic oligonucleotide
gucaggagccgggacgucatt

SEQ ID NO: 800 - DNA, 21 bp, Artificial Sequence
  Description of Artificial Sequence: Synthetic oligonucleotide
  Description of Combined DNA/RNA Molecule: Synthetic oligonucleotide
ugacgucccggcuccugactt

SEQ ID NO: 801 - DNA, 21 bp, Artificial Sequence
  Description of Artificial Sequence: Synthetic oligonucleotide
  Description of Combined DNA/RNA Molecule: Synthetic oligonucleotide
ucaggagccgggacgucagtt

SEQ ID NO: 802 - DNA, 21 bp, Artificial Sequence
  Description of Artificial Sequence: Synthetic oligonucleotide
  Description of Combined DNA/RNA Molecule: Synthetic oligonucleotide
cugacgucccggcuccugatt

SEQ ID NO: 803 - DNA, 21 bp, Artificial Sequence
  Description of Artificial Sequence: Synthetic oligonucleotide
  Description of Combined DNA/RNA Molecule: Synthetic oligonucleotide
ucaggagccgggacgucagtt

SEQ ID NO: 804 - DNA, 21 bp, Artificial Sequence
  Description of Artificial Sequence: Synthetic oligonucleotide
  Description of Combined DNA/RNA Molecule: Synthetic oligonucleotide
cugacgucccggcuccugatt

SEQ ID NO: 805 - DNA, 21 bp, Artificial Sequence
  Description of Artificial Sequence: Synthetic oligonucleotide
  Description of Combined DNA/RNA Molecule: Synthetic oligonucleotide
caggagccgggacgucagctt

SEQ ID NO: 806 - DNA, 21 bp, Artificial Sequence
  Description of Artificial Sequence: Synthetic oligonucleotide
  Description of Combined DNA/RNA Molecule: Synthetic oligonucleotide
gcugacgucccggcuccugtt

SEQ ID NO: 807 - DNA, 21 bp, Artificial Sequence
  Description of Artificial Sequence: Synthetic oligonucleotide
  Description of Combined DNA/RNA Molecule: Synthetic oligonucleotide
caggagccgggacgucagctt

SEQ ID NO: 808 - DNA, 21 bp, Artificial Sequence
  Description of Artificial Sequence: Synthetic oligonucleotide
  Description of Combined DNA/RNA Molecule: Synthetic oligonucleotide
gcugacgucccggcuccugtt

SEQ ID NO: 809 - DNA, 21 bp, Artificial Sequence
  Description of Artificial Sequence: Synthetic oligonucleotide
  Description of Combined DNA/RNA Molecule: Synthetic oligonucleotide
agccgggacgucagcacuatt

SEQ ID NO: 810 - DNA, 21 bp, Artificial Sequence
  Description of Artificial Sequence: Synthetic oligonucleotide
  Description of Combined DNA/RNA Molecule: Synthetic oligonucleotide
uagugcugacgucccggcutt

SEQ ID NO: 811 - DNA, 21 bp, Artificial Sequence
  Description of Artificial Sequence: Synthetic oligonucleotide
  Description of Combined DNA/RNA Molecule: Synthetic oligonucleotide
ccgggacgucagcacuacatt

SEQ ID NO: 812 - DNA, 21 bp, Artificial Sequence
  Description of Artificial Sequence: Synthetic oligonucleotide
  Description of Combined DNA/RNA Molecule: Synthetic oligonucleotide
uguagugcugacgucccggtt

SEQ ID NO: 813 - DNA, 21 bp, Artificial Sequence
  Description of Artificial Sequence: Synthetic oligonucleotide
  Description of Combined DNA/RNA Molecule: Synthetic oligonucleotide
ccgugacagccguugccautt

SEQ ID NO: 814 - DNA, 21 bp, Artificial Sequence
  Description of Artificial Sequence: Synthetic oligonucleotide
  Description of Combined DNA/RNA Molecule: Synthetic oligonucleotide
auggcaacggcugucacggtt

SEQ ID NO: 815 - DNA, 21 bp, Artificial Sequence
  Description of Artificial Sequence: Synthetic oligonucleotide
  Description of Combined DNA/RNA Molecule: Synthetic oligonucleotide
gccaucugcugccggagcctt

SEQ ID NO: 816 - DNA, 21 bp, Artificial Sequence
  Description of Artificial Sequence: Synthetic oligonucleotide
  Description of Combined DNA/RNA Molecule: Synthetic oligonucleotide
ggcuccggcagcagauggctt

SEQ ID NO: 817 - DNA, 21 bp, Artificial Sequence
  Description of Artificial Sequence: Synthetic oligonucleotide
  Description of Combined DNA/RNA Molecule: Synthetic oligonucleotide
cccaucccaggaugggugutt

SEQ ID NO: 818 - DNA, 21 bp, Artificial Sequence
  Description of Artificial Sequence: Synthetic oligonucleotide
  Description of Combined DNA/RNA Molecule: Synthetic oligonucleotide
acacccauccugggaugggtt

SEQ ID NO: 819 - DNA, 21 bp, Artificial Sequence
  Description of Artificial Sequence: Synthetic oligonucleotide
  Description of Combined DNA/RNA Molecule: Synthetic oligonucleotide
caucccaggaugggugucutt

SEQ ID NO: 820 - DNA, 21 bp, Artificial Sequence
  Description of Artificial Sequence: Synthetic oligonucleotide
  Description of Combined DNA/RNA Molecule: Synthetic oligonucleotide
agacacccauccugggaugtt

SEQ ID NO: 821 - DNA, 21 bp, Artificial Sequence
  Description of Artificial Sequence: Synthetic oligonucleotide
  Description of Combined DNA/RNA Molecule: Synthetic oligonucleotide
agcuuuaaaaugguuccgatt

SEQ ID NO: 822 - DNA, 21 bp, Artificial Sequence
  Description of Artificial Sequence: Synthetic oligonucleotide
  Description of Combined DNA/RNA Molecule: Synthetic oligonucleotide
ucggaaccauuuuaaagcutt

SEQ ID NO: 823 - DNA, 21 bp, Artificial Sequence
  Description of Artificial Sequence: Synthetic oligonucleotide
  Description of Combined DNA/RNA Molecule: Synthetic oligonucleotide
gcuuuaaaaugguuccgactt

SEQ ID NO: 824 - DNA, 21 bp, Artificial Sequence
  Description of Artificial Sequence: Synthetic oligonucleotide
  Description of Combined DNA/RNA Molecule: Synthetic oligonucleotide
gucggaaccauuuuaaagctt

SEQ ID NO: 825 - DNA, 21 bp, Artificial Sequence
  Description of Artificial Sequence: Synthetic oligonucleotide
  Description of Combined DNA/RNA Molecule: Synthetic oligonucleotide
cuuuaaaaugguuccgacutt

SEQ ID NO: 826 - DNA, 21 bp, Artificial Sequence
  Description of Artificial Sequence: Synthetic oligonucleotide
  Description of Combined DNA/RNA Molecule: Synthetic oligonucleotide
agucggaaccauuuuaaagtt

SEQ ID NO: 827 - DNA, 21 bp, Artificial Sequence
  Description of Artificial Sequence: Synthetic oligonucleotide
  Description of Combined DNA/RNA Molecule: Synthetic oligonucleotide
uuuaaaaugguuccgacuutt

SEQ ID NO: 828 - DNA, 21 bp, Artificial Sequence
  Description of Artificial Sequence: Synthetic oligonucleotide
  Description of Combined DNA/RNA Molecule: Synthetic oligonucleotide
aagucggaaccauuuuaaatt

SEQ ID NO: 829 - DNA, 21 bp, Artificial Sequence
  Description of Artificial Sequence: Synthetic oligonucleotide
  Description of Combined DNA/RNA Molecule: Synthetic oligonucleotide
uuaaaaugguuccgacuugtt

SEQ ID NO: 830 - DNA, 21 bp, Artificial Sequence
  Description of Artificial Sequence: Synthetic oligonucleotide
  Description of Combined DNA/RNA Molecule: Synthetic oligonucleotide
caagucggaaccauuuuaatt

SEQ ID NO: 831 - DNA, 21 bp, Artificial Sequence
  Description of Artificial Sequence: Synthetic oligonucleotide
  Description of Combined DNA/RNA Molecule: Synthetic oligonucleotide
uaaaaugguuccgacuugutt

SEQ ID NO: 832 - DNA, 21 bp, Artificial Sequence
  Description of Artificial Sequence: Synthetic oligonucleotide
  Description of Combined DNA/RNA Molecule: Synthetic oligonucleotide
acaagucggaaccauuuuatt

SEQ ID NO: 833 - DNA, 21 bp, Artificial Sequence
  Description of Artificial Sequence: Synthetic oligonucleotide
  Description of Combined DNA/RNA Molecule: Synthetic oligonucleotide
aaaaugguuccgacuuguctt

SEQ ID NO: 834 - DNA, 21 bp, Artificial Sequence
  Description of Artificial Sequence: Synthetic oligonucleotide
  Description of Combined DNA/RNA Molecule: Synthetic oligonucleotide
gacaagucggaaccauuuutt

SEQ ID NO: 835 - DNA, 21 bp, Artificial Sequence
  Description of Artificial Sequence: Synthetic oligonucleotide
  Description of Combined DNA/RNA Molecule: Synthetic oligonucleotide
aaaugguuccgacuugucctt

SEQ ID NO: 836 - DNA, 21 bp, Artificial Sequence
  Description of Artificial Sequence: Synthetic oligonucleotide
  Description of Combined DNA/RNA Molecule: Synthetic oligonucleotide
ggacaagucggaaccauuutt

SEQ ID NO: 837 - DNA, 21 bp, Artificial Sequence
  Description of Artificial Sequence: Synthetic oligonucleotide
  Description of Combined DNA/RNA Molecule: Synthetic oligonucleotide
aaugguuccgacuuguccctt

SEQ ID NO: 838 - DNA, 21 bp, Artificial Sequence
  Description of Artificial Sequence: Synthetic oligonucleotide
  Description of Combined DNA/RNA Molecule: Synthetic oligonucleotide
gggacaagucggaaccauutt

SEQ ID NO: 839 - DNA, 21 bp, Artificial Sequence
  Description of Artificial Sequence: Synthetic oligonucleotide
  Description of Combined DNA/RNA Molecule: Synthetic oligonucleotide
gguuccgacuugucccucutt

SEQ ID NO: 840 - DNA, 21 bp, Artificial Sequence
  Description of Artificial Sequence: Synthetic oligonucleotide
  Description of Combined DNA/RNA Molecule: Synthetic oligonucleotide
agagggacaagucggaacctt

SEQ ID NO: 841 - DNA, 21 bp, Artificial Sequence
  Description of Artificial Sequence: Synthetic oligonucleotide
  Description of Combined DNA/RNA Molecule: Synthetic oligonucleotide
cuccauggccuggcacgagtt

SEQ ID NO: 842 - DNA, 21 bp, Artificial Sequence
  Description of Artificial Sequence: Synthetic oligonucleotide
  Description of Combined DNA/RNA Molecule: Synthetic oligonucleotide
cucgugccaggccauggagtt

SEQ ID NO: 843 - DNA, 21 bp, Artificial Sequence
  Description of Artificial Sequence: Synthetic oligonucleotide
  Description of Combined DNA/RNA Molecule: Synthetic oligonucleotide
ccauggccuggcacgagggtt

SEQ ID NO: 844 - DNA, 21 bp, Artificial Sequence
  Description of Artificial Sequence: Synthetic oligonucleotide
  Description of Combined DNA/RNA Molecule: Synthetic oligonucleotide
cccucgugccaggccauggtt

SEQ ID NO: 845 - DNA, 21 bp, Artificial Sequence
  Description of Artificial Sequence: Synthetic oligonucleotide
  Description of Combined DNA/RNA Molecule: Synthetic oligonucleotide
gaacucacucacucugggutt

SEQ ID NO: 846 - DNA, 21 bp, Artificial Sequence
  Description of Artificial Sequence: Synthetic oligonucleotide
  Description of Combined DNA/RNA Molecule: Synthetic oligonucleotide
acccagagugagugaguuctt

SEQ ID NO: 847 - DNA, 21 bp, Artificial Sequence
  Description of Artificial Sequence: Synthetic oligonucleotide
  Description of Combined DNA/RNA Molecule: Synthetic oligonucleotide
ucacucacucugggugccutt

SEQ ID NO: 848 - DNA, 21 bp, Artificial Sequence
  Description of Artificial Sequence: Synthetic oligonucleotide
  Description of Combined DNA/RNA Molecule: Synthetic oligonucleotide
aggcacccagagugagugatt

SEQ ID NO: 849 - DNA, 21 bp, Artificial Sequence
  Description of Artificial Sequence: Synthetic oligonucleotide
  Description of Combined DNA/RNA Molecule: Synthetic oligonucleotide
uuucaccauucaaacaggutt

SEQ ID NO: 850 - DNA, 21 bp, Artificial Sequence
  Description of Artificial Sequence: Synthetic oligonucleotide
  Description of Combined DNA/RNA Molecule: Synthetic oligonucleotide
accuguuugaauggugaaatt

SEQ ID NO: 851 - DNA, 21 bp, Artificial Sequence
  Description of Artificial Sequence: Synthetic oligonucleotide
  Description of Combined DNA/RNA Molecule: Synthetic oligonucleotide
cauucaaacaggucgagcutt

SEQ ID NO: 852 - DNA, 21 bp, Artificial Sequence
  Description of Artificial Sequence: Synthetic oligonucleotide
  Description of Combined DNA/RNA Molecule: Synthetic oligonucleotide
agcucgaccuguuugaaugtt

SEQ ID NO: 853 - DNA, 21 bp, Artificial Sequence
  Description of Artificial Sequence: Synthetic oligonucleotide
  Description of Combined DNA/RNA Molecule: Synthetic oligonucleotide
auucaaacaggucgagcugtt

SEQ ID NO: 854 - DNA, 21 bp, Artificial Sequence
  Description of Artificial Sequence: Synthetic oligonucleotide
  Description of Combined DNA/RNA Molecule: Synthetic oligonucleotide
cagcucgaccuguuugaautt

SEQ ID NO: 855 - DNA, 21 bp, Artificial Sequence
  Description of Artificial Sequence: Synthetic oligonucleotide
  Description of Combined DNA/RNA Molecule: Synthetic oligonucleotide
uucaaacaggucgagcugutt

SEQ ID NO: 856 - DNA, 21 bp, Artificial Sequence
  Description of Artificial Sequence: Synthetic oligonucleotide
  Description of Combined DNA/RNA Molecule: Synthetic oligonucleotide
acagcucgaccuguuugaatt

SEQ ID NO: 857 - DNA, 21 bp, Artificial Sequence
  Description of Artificial Sequence: Synthetic oligonucleotide
  Description of Combined DNA/RNA Molecule: Synthetic oligonucleotide
ucaaacaggucgagcugugtt

SEQ ID NO: 858 - DNA, 21 bp, Artificial Sequence
  Description of Artificial Sequence: Synthetic oligonucleotide
  Description of Combined DNA/RNA Molecule: Synthetic oligonucleotide
cacagcucgaccuguuugatt

SEQ ID NO: 859 - DNA, 21 bp, Artificial Sequence
  Description of Artificial Sequence: Synthetic oligonucleotide
  Description of Combined DNA/RNA Molecule: Synthetic oligonucleotide
caaacaggucgagcugugctt

SEQ ID NO: 860 - DNA, 21 bp, Artificial Sequence
  Description of Artificial Sequence: Synthetic oligonucleotide
  Description of Combined DNA/RNA Molecule: Synthetic oligonucleotide
gcacagcucgaccuguuugtt

SEQ ID NO: 861 - DNA, 21 bp, Artificial Sequence
  Description of Artificial Sequence: Synthetic oligonucleotide
  Description of Combined DNA/RNA Molecule: Synthetic oligonucleotide
aaacaggucgagcugugcutt

SEQ ID NO: 862 - DNA, 21 bp, Artificial Sequence
  Description of Artificial Sequence: Synthetic oligonucleotide
  Description of Combined DNA/RNA Molecule: Synthetic oligonucleotide
agcacagcucgaccuguuutt

SEQ ID NO: 863 - DNA, 21 bp, Artificial Sequence
  Description of Artificial Sequence: Synthetic oligonucleotide
  Description of Combined DNA/RNA Molecule: Synthetic oligonucleotide
aacaggucgagcugugcuctt

SEQ ID NO: 864 - DNA, 21 bp, Artificial Sequence
  Description of Artificial Sequence: Synthetic oligonucleotide
  Description of Combined DNA/RNA Molecule: Synthetic oligonucleotide
gagcacagcucgaccuguutt

SEQ ID NO: 865 - DNA, 21 bp, Artificial Sequence
  Description of Artificial Sequence: Synthetic oligonucleotide
  Description of Combined DNA/RNA Molecule: Synthetic oligonucleotide
caggucgagcugugcucggtt

SEQ ID NO: 866 - DNA, 21 bp, Artificial Sequence
  Description of Artificial Sequence: Synthetic oligonucleotide
  Description of Combined DNA/RNA Molecule: Synthetic oligonucleotide
ccgagcacagcucgaccugtt

SEQ ID NO: 867 - DNA, 21 bp, Artificial Sequence
  Description of Artificial Sequence: Synthetic oligonucleotide
  Description of Combined DNA/RNA Molecule: Synthetic oligonucleotide
aggucgagcugugcucgggtt

SEQ ID NO: 868 - DNA, 21 bp, Artificial Sequence
  Description of Artificial Sequence: Synthetic oligonucleotide
  Description of Combined DNA/RNA Molecule: Synthetic oligonucleotide
cccgagcacagcucgaccutt

SEQ ID NO: 869 - DNA, 21 bp, Artificial Sequence
  Description of Artificial Sequence: Synthetic oligonucleotide
  Description of Combined DNA/RNA Molecule: Synthetic oligonucleotide
gucgagcugugcucgggugtt

SEQ ID NO: 870 - DNA, 21 bp, Artificial Sequence
  Description of Artificial Sequence: Synthetic oligonucleotide
  Description of Combined DNA/RNA Molecule: Synthetic oligonucleotide
cacccgagcacagcucgactt

SEQ ID NO: 871 - DNA, 21 bp, Artificial Sequence
  Description of Artificial Sequence: Synthetic oligonucleotide
  Description of Combined DNA/RNA Molecule: Synthetic oligonucleotide
ucgagcugugcucgggugctt

SEQ ID NO: 872 - DNA, 21 bp, Artificial Sequence
  Description of Artificial Sequence: Synthetic oligonucleotide
  Description of Combined DNA/RNA Molecule: Synthetic oligonucleotide
gcacccgagcacagcucgatt

SEQ ID NO: 873 - DNA, 21 bp, Artificial Sequence
  Description of Artificial Sequence: Synthetic oligonucleotide
  Description of Combined DNA/RNA Molecule: Synthetic oligonucleotide
agcugcucccaaugugccgtt

SEQ ID NO: 874 - DNA, 21 bp, Artificial Sequence
  Description of Artificial Sequence: Synthetic oligonucleotide
  Description of Combined DNA/RNA Molecule: Synthetic oligonucleotide
cggcacauugggagcagcutt

SEQ ID NO: 875 - DNA, 21 bp, Artificial Sequence
  Description of Artificial Sequence: Synthetic oligonucleotide
  Description of Combined DNA/RNA Molecule: Synthetic oligonucleotide
gcugcucccaaugugccgatt

SEQ ID NO: 876 - DNA, 21 bp, Artificial Sequence
  Description of Artificial Sequence: Synthetic oligonucleotide
  Description of Combined DNA/RNA Molecule: Synthetic oligonucleotide
ucggcacauugggagcagctt

SEQ ID NO: 877 - DNA, 21 bp, Artificial Sequence
  Description of Artificial Sequence: Synthetic oligonucleotide
  Description of Combined DNA/RNA Molecule: Synthetic oligonucleotide
ugcucccaaugugccgaugtt

SEQ ID NO: 878 - DNA, 21 bp, Artificial Sequence
  Description of Artificial Sequence: Synthetic oligonucleotide
  Description of Combined DNA/RNA Molecule: Synthetic oligonucleotide
caucggcacauugggagcatt

SEQ ID NO: 879 - DNA, 21 bp, Artificial Sequence
  Description of Artificial Sequence: Synthetic oligonucleotide
  Description of Combined DNA/RNA Molecule: Synthetic oligonucleotide
ucccaaugugccgaugucctt

SEQ ID NO: 880 - DNA, 21 bp, Artificial Sequence
  Description of Artificial Sequence: Synthetic oligonucleotide
  Description of Combined DNA/RNA Molecule: Synthetic oligonucleotide
ggacaucggcacauugggatt

SEQ ID NO: 881 - DNA, 21 bp, Artificial Sequence
  Description of Artificial Sequence: Synthetic oligonucleotide
  Description of Combined DNA/RNA Molecule: Synthetic oligonucleotide
ccaaugugccgauguccgutt

SEQ ID NO: 882 - DNA, 21 bp, Artificial Sequence
  Description of Artificial Sequence: Synthetic oligonucleotide
  Description of Combined DNA/RNA Molecule: Synthetic oligonucleotide
acggacaucggcacauuggtt

SEQ ID NO: 883 - DNA, 21 bp, Artificial Sequence
  Description of Artificial Sequence: Synthetic oligonucleotide
  Description of Combined DNA/RNA Molecule: Synthetic oligonucleotide
caaugugccgauguccgugtt

SEQ ID NO: 884 - DNA, 21 bp, Artificial Sequence
  Description of Artificial Sequence: Synthetic oligonucleotide
  Description of Combined DNA/RNA Molecule: Synthetic oligonucleotide
cacggacaucggcacauugtt

SEQ ID NO: 885 - DNA, 21 bp, Artificial Sequence
  Description of Artificial Sequence: Synthetic oligonucleotide
  Description of Combined DNA/RNA Molecule: Synthetic oligonucleotide
aaugugccgauguccguggtt

SEQ ID NO: 886 - DNA, 21 bp, Artificial Sequence
  Description of Artificial Sequence: Synthetic oligonucleotide
  Description of Combined DNA/RNA Molecule: Synthetic oligonucleotide
ccacggacaucggcacauutt

SEQ ID NO: 887 - DNA, 21 bp, Artificial Sequence
  Description of Artificial Sequence: Synthetic oligonucleotide
  Description of Combined DNA/RNA Molecule: Synthetic oligonucleotide
ccgauguccgugggcagaatt

SEQ ID NO: 888 - DNA, 21 bp, Artificial Sequence
  Description of Artificial Sequence: Synthetic oligonucleotide
  Description of Combined DNA/RNA Molecule: Synthetic oligonucleotide
uucugcccacggacaucggtt

SEQ ID NO: 889 - DNA, 21 bp, Artificial Sequence
  Description of Artificial Sequence: Synthetic oligonucleotide
  Description of Combined DNA/RNA Molecule: Synthetic oligonucleotide
gauguccgugggcagaaugtt

SEQ ID NO: 890 - DNA, 21 bp, Artificial Sequence
  Description of Artificial Sequence: Synthetic oligonucleotide
  Description of Combined DNA/RNA Molecule: Synthetic oligonucleotide
cauucugcccacggacauctt

SEQ ID NO: 891 - DNA, 21 bp, Artificial Sequence
  Description of Artificial Sequence: Synthetic oligonucleotide
  Description of Combined DNA/RNA Molecule: Synthetic oligonucleotide
guccgugggcagaaugacutt

SEQ ID NO: 892 - DNA, 21 bp, Artificial Sequence
  Description of Artificial Sequence: Synthetic oligonucleotide
  Description of Combined DNA/RNA Molecule: Synthetic oligonucleotide
agucauucugcccacggactt

SEQ ID NO: 893 - DNA, 21 bp, Artificial Sequence
  Description of Artificial Sequence: Synthetic oligonucleotide
  Description of Combined DNA/RNA Molecule: Synthetic oligonucleotide
uccgugggcagaaugacuutt

SEQ ID NO: 894 - DNA, 21 bp, Artificial Sequence
  Description of Artificial Sequence: Synthetic oligonucleotide
  Description of Combined DNA/RNA Molecule: Synthetic oligonucleotide
aagucauucugcccacggatt

SEQ ID NO: 895 - DNA, 21 bp, Artificial Sequence
  Description of Artificial Sequence: Synthetic oligonucleotide
  Description of Combined DNA/RNA Molecule: Synthetic oligonucleotide
ugggcagaaugacuuuuautt

SEQ ID NO: 896 - DNA, 21 bp, Artificial Sequence
  Description of Artificial Sequence: Synthetic oligonucleotide
  Description of Combined DNA/RNA Molecule: Synthetic oligonucleotide
auaaaagucauucugcccatt

SEQ ID NO: 897 - DNA, 21 bp, Artificial Sequence
  Description of Artificial Sequence: Synthetic oligonucleotide
  Description of Combined DNA/RNA Molecule: Synthetic oligonucleotide
acuuuuauugagcucuugutt

SEQ ID NO: 898 - DNA, 21 bp, Artificial Sequence
  Description of Artificial Sequence: Synthetic oligonucleotide
  Description of Combined DNA/RNA Molecule: Synthetic oligonucleotide
acaagagcucaauaaaagutt

SEQ ID NO: 899 - DNA, 21 bp, Artificial Sequence
  Description of Artificial Sequence: Synthetic oligonucleotide
  Description of Combined DNA/RNA Molecule: Synthetic oligonucleotide
auugagcucuuguuccgugtt

SEQ ID NO: 900 - DNA, 21 bp, Artificial Sequence
  Description of Artificial Sequence: Synthetic oligonucleotide
  Description of Combined DNA/RNA Molecule: Synthetic oligonucleotide
cacggaacaagagcucaautt

SEQ ID NO: 901 - DNA, 21 bp, Artificial Sequence
  Description of Artificial Sequence: Synthetic oligonucleotide
  Description of Combined DNA/RNA Molecule: Synthetic oligonucleotide
agcucuuguuccgugccagtt

SEQ ID NO: 902 - DNA, 21 bp, Artificial Sequence
  Description of Artificial Sequence: Synthetic oligonucleotide
  Description of Combined DNA/RNA Molecule: Synthetic oligonucleotide
cuggcacggaacaagagcutt

SEQ ID NO: 903 - DNA, 21 bp, Artificial Sequence
  Description of Artificial Sequence: Synthetic oligonucleotide
  Description of Combined DNA/RNA Molecule: Synthetic oligonucleotide
gcucuuguuccgugccaggtt

SEQ ID NO: 904 - DNA, 21 bp, Artificial Sequence
  Description of Artificial Sequence: Synthetic oligonucleotide
  Description of Combined DNA/RNA Molecule: Synthetic oligonucleotide
ccuggcacggaacaagagctt

SEQ ID NO: 905 - DNA, 21 bp, Artificial Sequence
  Description of Artificial Sequence: Synthetic oligonucleotide
  Description of Combined DNA/RNA Molecule: Synthetic oligonucleotide
uguuccgugccaggcauuctt

SEQ ID NO: 906 - DNA, 21 bp, Artificial Sequence
  Description of Artificial Sequence: Synthetic oligonucleotide
  Description of Combined DNA/RNA Molecule: Synthetic oligonucleotide
gaaugccuggcacggaacatt

SEQ ID NO: 907 - DNA, 21 bp, Artificial Sequence
  Description of Artificial Sequence: Synthetic oligonucleotide
  Description of Combined DNA/RNA Molecule: Synthetic oligonucleotide
guuccgugccaggcauucatt

SEQ ID NO: 908 - DNA, 21 bp, Artificial Sequence
  Description of Artificial Sequence: Synthetic oligonucleotide
  Description of Combined DNA/RNA Molecule: Synthetic oligonucleotide
ugaaugccuggcacggaactt

SEQ ID NO: 909 - DNA, 21 bp, Artificial Sequence
  Description of Artificial Sequence: Synthetic oligonucleotide
  Description of Combined DNA/RNA Molecule: Synthetic oligonucleotide
uuccgugccaggcauucaatt

SEQ ID NO: 910 - DNA, 21 bp, Artificial Sequence
  Description of Artificial Sequence: Synthetic oligonucleotide
  Description of Combined DNA/RNA Molecule: Synthetic oligonucleotide
uugaaugccuggcacggaatt

SEQ ID NO: 911 - DNA, 21 bp, Artificial Sequence
  Description of Artificial Sequence: Synthetic oligonucleotide
  Description of Combined DNA/RNA Molecule: Synthetic oligonucleotide
cgugccaggcauucaaucctt

SEQ ID NO: 912 - DNA, 21 bp, Artificial Sequence
  Description of Artificial Sequence: Synthetic oligonucleotide
  Description of Combined DNA/RNA Molecule: Synthetic oligonucleotide
ggauugaaugccuggcacgtt

SEQ ID NO: 913 - DNA, 21 bp, Artificial Sequence
  Description of Artificial Sequence: Synthetic oligonucleotide
  Description of Combined DNA/RNA Molecule: Synthetic oligonucleotide
gugccaggcauucaauccutt

SEQ ID NO: 914 - DNA, 21 bp, Artificial Sequence
  Description of Artificial Sequence: Synthetic oligonucleotide
  Description of Combined DNA/RNA Molecule: Synthetic oligonucleotide
aggauugaaugccuggcactt

SEQ ID NO: 915 - DNA, 21 bp, Artificial Sequence
  Description of Artificial Sequence: Synthetic oligonucleotide
  Description of Combined DNA/RNA Molecule: Synthetic oligonucleotide
caauccucaggucuccacctt

SEQ ID NO: 916 - DNA, 21 bp, Artificial Sequence
  Description of Artificial Sequence: Synthetic oligonucleotide
  Description of Combined DNA/RNA Molecule: Synthetic oligonucleotide
gguggagaccugaggauugtt

SEQ ID NO: 917 - DNA, 21 bp, Artificial Sequence
  Description of Artificial Sequence: Synthetic oligonucleotide
  Description of Combined DNA/RNA Molecule: Synthetic oligonucleotide
caccaaggaggcaggauuctt

SEQ ID NO: 918 - DNA, 21 bp, Artificial Sequence
  Description of Artificial Sequence: Synthetic oligonucleotide
  Description of Combined DNA/RNA Molecule: Synthetic oligonucleotide
gaauccugccuccuuggugtt

SEQ ID NO: 919 - DNA, 21 bp, Artificial Sequence
  Description of Artificial Sequence: Synthetic oligonucleotide
  Description of Combined DNA/RNA Molecule: Synthetic oligonucleotide
caccaaggaggcaggauuctt

SEQ ID NO: 920 - DNA, 21 bp, Artificial Sequence
  Description of Artificial Sequence: Synthetic oligonucleotide
  Description of Combined DNA/RNA Molecule: Synthetic oligonucleotide
gaauccugccuccuuggugtt

SEQ ID NO: 921 - DNA, 21 bp, Artificial Sequence
  Description of Artificial Sequence: Synthetic oligonucleotide
  Description of Combined DNA/RNA Molecule: Synthetic oligonucleotide
caccaaggaggcaggauuctt

SEQ ID NO: 922 - DNA, 21 bp, Artificial Sequence
  Description of Artificial Sequence: Synthetic oligonucleotide
  Description of Combined DNA/RNA Molecule: Synthetic oligonucleotide
gaauccugccuccuuggugtt

SEQ ID NO: 923 - DNA, 21 bp, Artificial Sequence
  Description of Artificial Sequence: Synthetic oligonucleotide
  Description of Combined DNA/RNA Molecule: Synthetic oligonucleotide
caccaaggaggcaggauuctt

SEQ ID NO: 924 - DNA, 21 bp, Artificial Sequence
  Description of Artificial Sequence: Synthetic oligonucleotide
  Description of Combined DNA/RNA Molecule: Synthetic oligonucleotide
gaauccugccuccuuggugtt

SEQ ID NO: 925 - DNA, 21 bp, Artificial Sequence
  Description of Artificial Sequence: Synthetic oligonucleotide
  Description of Combined DNA/RNA Molecule: Synthetic oligonucleotide
caccaaggaggcaggauuctt

SEQ ID NO: 926 - DNA, 21 bp, Artificial Sequence
  Description of Artificial Sequence: Synthetic oligonucleotide
  Description of Combined DNA/RNA Molecule: Synthetic oligonucleotide
gaauccugccuccuuggugtt

SEQ ID NO: 927 - DNA, 21 bp, Artificial Sequence
  Description of Artificial Sequence: Synthetic oligonucleotide
  Description of Combined DNA/RNA Molecule: Synthetic oligonucleotide
caccaaggaggcaggauuctt

SEQ ID NO: 928 - DNA, 21 bp, Artificial Sequence
  Description of Artificial Sequence: Synthetic oligonucleotide
  Description of Combined DNA/RNA Molecule: Synthetic oligonucleotide
gaauccugccuccuuggugtt

SEQ ID NO: 929 - DNA, 21 bp, Artificial Sequence
  Description of Artificial Sequence: Synthetic oligonucleotide
  Description of Combined DNA/RNA Molecule: Synthetic oligonucleotide
caccaaggaggcaggauuctt

SEQ ID NO: 930 - DNA, 21 bp, Artificial Sequence
  Description of Artificial Sequence: Synthetic oligonucleotide
  Description of Combined DNA/RNA Molecule: Synthetic oligonucleotide
gaauccugccuccuuggugtt

SEQ ID NO: 931 - DNA, 21 bp, Artificial Sequence
  Description of Artificial Sequence: Synthetic oligonucleotide
  Description of Combined DNA/RNA Molecule: Synthetic oligonucleotide
caccaaggaggcaggauuctt

SEQ ID NO: 932 - DNA, 21 bp, Artificial Sequence
  Description of Artificial Sequence: Synthetic oligonucleotide
  Description of Combined DNA/RNA Molecule: Synthetic oligonucleotide
gaauccugccuccuuggugtt

SEQ ID NO: 933 - DNA, 21 bp, Artificial Sequence
  Description of Artificial Sequence: Synthetic oligonucleotide
  Description of Combined DNA/RNA Molecule: Synthetic oligonucleotide
caccaaggaggcaggauuctt

SEQ ID NO: 934 - DNA, 21 bp, Artificial Sequence
  Description of Artificial Sequence: Synthetic oligonucleotide
  Description of Combined DNA/RNA Molecule: Synthetic oligonucleotide
gaauccugccuccuuggugtt

SEQ ID NO: 935 - DNA, 21 bp, Artificial Sequence
  Description of Artificial Sequence: Synthetic oligonucleotide
  Description of Combined DNA/RNA Molecule: Synthetic oligonucleotide
ggccuggaguuuauucggatt

SEQ ID NO: 936 - DNA, 21 bp, Artificial Sequence
  Description of Artificial Sequence: Synthetic oligonucleotide
  Description of Combined DNA/RNA Molecule: Synthetic oligonucleotide
uccgaauaaacuccaggcctt

SEQ ID NO: 937 - DNA, 21 bp, Artificial Sequence
  Description of Artificial Sequence: Synthetic oligonucleotide
  Description of Combined DNA/RNA Molecule: Synthetic oligonucleotide
ggccuggaguuuauucggatt

SEQ ID NO: 938 - DNA, 21 bp, Artificial Sequence
  Description of Artificial Sequence: Synthetic oligonucleotide
  Description of Combined DNA/RNA Molecule: Synthetic oligonucleotide
uccgaauaaacuccaggcctt

SEQ ID NO: 939 - DNA, 21 bp, Artificial Sequence
  Description of Artificial Sequence: Synthetic oligonucleotide
  Description of Combined DNA/RNA Molecule: Synthetic oligonucleotide
ggccuggaguuuauucggatt

SEQ ID NO: 940 - DNA, 21 bp, Artificial Sequence
  Description of Artificial Sequence: Synthetic oligonucleotide
  Description of Combined DNA/RNA Molecule: Synthetic oligonucleotide
uccgaauaaacuccaggcctt

SEQ ID NO: 941 - DNA, 21 bp, Artificial Sequence
  Description of Artificial Sequence: Synthetic oligonucleotide
  Description of Combined DNA/RNA Molecule: Synthetic oligonucleotide
ggccuggaguuuauucggatt

SEQ ID NO: 942 - DNA, 21 bp, Artificial Sequence
  Description of Artificial Sequence: Synthetic oligonucleotide
  Description of Combined DNA/RNA Molecule: Synthetic oligonucleotide
uccgaauaaacuccaggcctt

SEQ ID NO: 943 - DNA, 21 bp, Artificial Sequence
  Description of Artificial Sequence: Synthetic oligonucleotide
  Description of Combined DNA/RNA Molecule: Synthetic oligonucleotide
ggccuggaguuuauucggatt

SEQ ID NO: 944 - DNA, 21 bp, Artificial Sequence
  Description of Artificial Sequence: Synthetic oligonucleotide
  Description of Combined DNA/RNA Molecule: Synthetic oligonucleotide
uccgaauaaacuccaggcctt

SEQ ID NO: 945 - DNA, 21 bp, Artificial Sequence
  Description of Artificial Sequence: Synthetic oligonucleotide
  Description of Combined DNA/RNA Molecule: Synthetic oligonucleotide
ggccuggaguuuauucggatt

SEQ ID NO: 946 - DNA, 21 bp, Artificial Sequence
  Description of Artificial Sequence: Synthetic oligonucleotide
  Description of Combined DNA/RNA Molecule: Synthetic oligonucleotide
uccgaauaaacuccaggcctt

SEQ ID NO: 947 - DNA, 21 bp, Artificial Sequence
  Description of Artificial Sequence: Synthetic oligonucleotide
  Description of Combined DNA/RNA Molecule: Synthetic oligonucleotide
ggccuggaguuuauucggatt

SEQ ID NO: 948 - DNA, 21 bp, Artificial Sequence
  Description of Artificial Sequence: Synthetic oligonucleotide
  Description of Combined DNA/RNA Molecule: Synthetic oligonucleotide
uccgaauaaacuccaggcctt

SEQ ID NO: 949 - DNA, 21 bp, Artificial Sequence
  Description of Artificial Sequence: Synthetic oligonucleotide
  Description of Combined DNA/RNA Molecule: Synthetic oligonucleotide
gcaggauucuucccauggatt

SEQ ID NO: 950 - DNA, 21 bp, Artificial Sequence
  Description of Artificial Sequence: Synthetic oligonucleotide
  Description of Combined DNA/RNA Molecule: Synthetic oligonucleotide
uccaugggaagaauccugctt

SEQ ID NO: 951 - DNA, 21 bp, Artificial Sequence
  Description of Artificial Sequence: Synthetic oligonucleotide
  Description of Combined DNA/RNA Molecule: Synthetic oligonucleotide
ugcagggacaaacaucguutt

SEQ ID NO: 952 - DNA, 21 bp, Artificial Sequence
  Description of Artificial Sequence: Synthetic oligonucleotide
  Description of Combined DNA/RNA Molecule: Synthetic oligonucleotide
aacgauguuugucccugcatt

SEQ ID NO: 953 - DNA, 21 bp, Artificial Sequence
  Description of Artificial Sequence: Synthetic oligonucleotide
  Description of Combined DNA/RNA Molecule: Synthetic oligonucleotide
gcagggacaaacaucguugtt

SEQ ID NO: 954 - DNA, 21 bp, Artificial Sequence
  Description of Artificial Sequence: Synthetic oligonucleotide
  Description of Combined DNA/RNA Molecule: Synthetic oligonucleotide
caacgauguuugucccugctt

SEQ ID NO: 955 - DNA, 21 bp, Artificial Sequence
  Description of Artificial Sequence: Synthetic oligonucleotide
  Description of Combined DNA/RNA Molecule: Synthetic oligonucleotide
agggacaaacaucguugggtt

SEQ ID NO: 956 - DNA, 21 bp, Artificial Sequence
  Description of Artificial Sequence: Synthetic oligonucleotide
  Description of Combined DNA/RNA Molecule: Synthetic oligonucleotide
cccaacgauguuugucccutt

SEQ ID NO: 957 - DNA, 21 bp, Artificial Sequence
  Description of Artificial Sequence: Synthetic oligonucleotide
  Description of Combined DNA/RNA Molecule: Synthetic oligonucleotide
cccucaucuccagcuaacutt

SEQ ID NO: 958 - DNA, 21 bp, Artificial Sequence
  Description of Artificial Sequence: Synthetic oligonucleotide
  Description of Combined DNA/RNA Molecule: Synthetic oligonucleotide
aguuagcuggagaugagggtt

SEQ ID NO: 959 - DNA, 21 bp, Artificial Sequence
  Description of Artificial Sequence: Synthetic oligonucleotide
  Description of Combined DNA/RNA Molecule: Synthetic oligonucleotide
caucuccagcuaacuguggtt

SEQ ID NO: 960 - DNA, 21 bp, Artificial Sequence
  Description of Artificial Sequence: Synthetic oligonucleotide
  Description of Combined DNA/RNA Molecule: Synthetic oligonucleotide
ccacaguuagcuggagaugtt

SEQ ID NO: 961 - DNA, 21 bp, Artificial Sequence
  Description of Artificial Sequence: Synthetic oligonucleotide
  Description of Combined DNA/RNA Molecule: Synthetic oligonucleotide
gcucccugauuaauggaggtt

SEQ ID NO: 962 - DNA, 21 bp, Artificial Sequence
  Description of Artificial Sequence: Synthetic oligonucleotide
  Description of Combined DNA/RNA Molecule: Synthetic oligonucleotide
ccuccauuaaucagggagctt

SEQ ID NO: 963 - DNA, 21 bp, Artificial Sequence
  Description of Artificial Sequence: Synthetic oligonucleotide
  Description of Combined DNA/RNA Molecule: Synthetic oligonucleotide
cccugauuaauggaggcuutt

SEQ ID NO: 964 - DNA, 21 bp, Artificial Sequence
  Description of Artificial Sequence: Synthetic oligonucleotide
  Description of Combined DNA/RNA Molecule: Synthetic oligonucleotide
aagccuccauuaaucagggtt

SEQ ID NO: 965 - DNA, 21 bp, Artificial Sequence
  Description of Artificial Sequence: Synthetic oligonucleotide
  Description of Combined DNA/RNA Molecule: Synthetic oligonucleotide
ccugauuaauggaggcuuatt

SEQ ID NO: 966 - DNA, 21 bp, Artificial Sequence
  Description of Artificial Sequence: Synthetic oligonucleotide
  Description of Combined DNA/RNA Molecule: Synthetic oligonucleotide
uaagccuccauuaaucaggtt

SEQ ID NO: 967 - DNA, 21 bp, Artificial Sequence
  Description of Artificial Sequence: Synthetic oligonucleotide
  Description of Combined DNA/RNA Molecule: Synthetic oligonucleotide
ugauuaauggaggcuuagctt

SEQ ID NO: 968 - DNA, 21 bp, Artificial Sequence
  Description of Artificial Sequence: Synthetic oligonucleotide
  Description of Combined DNA/RNA Molecule: Synthetic oligonucleotide
gcuaagccuccauuaaucatt

SEQ ID NO: 969 - DNA, 21 bp, Artificial Sequence
  Description of Artificial Sequence: Synthetic oligonucleotide
  Description of Combined DNA/RNA Molecule: Synthetic oligonucleotide
gauuaauggaggcuuagcutt

SEQ ID NO: 970 - DNA, 21 bp, Artificial Sequence
  Description of Artificial Sequence: Synthetic oligonucleotide
  Description of Combined DNA/RNA Molecule: Synthetic oligonucleotide
agcuaagccuccauuaauctt

SEQ ID NO: 971 - DNA, 21 bp, Artificial Sequence
  Description of Artificial Sequence: Synthetic oligonucleotide
  Description of Combined DNA/RNA Molecule: Synthetic oligonucleotide
auuaauggaggcuuagcuutt

SEQ ID NO: 972 - DNA, 21 bp, Artificial Sequence
  Description of Artificial Sequence: Synthetic oligonucleotide
  Description of Combined DNA/RNA Molecule: Synthetic oligonucleotide
aagcuaagccuccauuaautt

SEQ ID NO: 973 - DNA, 21 bp, Artificial Sequence
  Description of Artificial Sequence: Synthetic oligonucleotide
  Description of Combined DNA/RNA Molecule: Synthetic oligonucleotide
uuaauggaggcuuagcuuutt

SEQ ID NO: 974 - DNA, 21 bp, Artificial Sequence
  Description of Artificial Sequence: Synthetic oligonucleotide
  Description of Combined DNA/RNA Molecule: Synthetic oligonucleotide
aaagcuaagccuccauuaatt

SEQ ID NO: 975 - DNA, 21 bp, Artificial Sequence
  Description of Artificial Sequence: Synthetic oligonucleotide
  Description of Combined DNA/RNA Molecule: Synthetic oligonucleotide
uuucuggauggcaucuagctt

SEQ ID NO: 976 - DNA, 21 bp, Artificial Sequence
  Description of Artificial Sequence: Synthetic oligonucleotide
  Description of Combined DNA/RNA Molecule: Synthetic oligonucleotide
gcuagaugccauccagaaatt

SEQ ID NO: 977 - DNA, 21 bp, Artificial Sequence
  Description of Artificial Sequence: Synthetic oligonucleotide
  Description of Combined DNA/RNA Molecule: Synthetic oligonucleotide
uuucuggauggcaucuagctt

SEQ ID NO: 978 - DNA, 21 bp, Artificial Sequence
  Description of Artificial Sequence: Synthetic oligonucleotide
  Description of Combined DNA/RNA Molecule: Synthetic oligonucleotide
gcuagaugccauccagaaatt

SEQ ID NO: 979 - DNA, 21 bp, Artificial Sequence
  Description of Artificial Sequence: Synthetic oligonucleotide
  Description of Combined DNA/RNA Molecule: Synthetic oligonucleotide
uucuggauggcaucuagcctt

SEQ ID NO: 980 - DNA, 21 bp, Artificial Sequence
  Description of Artificial Sequence: Synthetic oligonucleotide
  Description of Combined DNA/RNA Molecule: Synthetic oligonucleotide
ggcuagaugccauccagaatt

SEQ ID NO: 981 - DNA, 21 bp, Artificial Sequence
  Description of Artificial Sequence: Synthetic oligonucleotide
  Description of Combined DNA/RNA Molecule: Synthetic oligonucleotide
uucuggauggcaucuagcctt

SEQ ID NO: 982 - DNA, 21 bp, Artificial Sequence
  Description of Artificial Sequence: Synthetic oligonucleotide
  Description of Combined DNA/RNA Molecule: Synthetic oligonucleotide
ggcuagaugccauccagaatt

SEQ ID NO: 983 - DNA, 21 bp, Artificial Sequence
  Description of Artificial Sequence: Synthetic oligonucleotide
  Description of Combined DNA/RNA Molecule: Synthetic oligonucleotide
ucuggauggcaucuagccatt

SEQ ID NO: 984 - DNA, 21 bp, Artificial Sequence
  Description of Artificial Sequence: Synthetic oligonucleotide
  Description of Combined DNA/RNA Molecule: Synthetic oligonucleotide
uggcuagaugccauccagatt

SEQ ID NO: 985 - DNA, 21 bp, Artificial Sequence
  Description of Artificial Sequence: Synthetic oligonucleotide
  Description of Combined DNA/RNA Molecule: Synthetic oligonucleotide
ucuggauggcaucuagccatt

SEQ ID NO: 986 - DNA, 21 bp, Artificial Sequence
  Description of Artificial Sequence: Synthetic oligonucleotide
  Description of Combined DNA/RNA Molecule: Synthetic oligonucleotide
uggcuagaugccauccagatt

SEQ ID NO: 987 - DNA, 21 bp, Artificial Sequence
  Description of Artificial Sequence: Synthetic oligonucleotide
  Description of Combined DNA/RNA Molecule: Synthetic oligonucleotide
aggcuggagacaggugcgctt

SEQ ID NO: 988 - DNA, 21 bp, Artificial Sequence
  Description of Artificial Sequence: Synthetic oligonucleotide
  Description of Combined DNA/RNA Molecule: Synthetic oligonucleotide
gcgcaccugucuccagccutt

SEQ ID NO: 989 - DNA, 21 bp, Artificial Sequence
  Description of Artificial Sequence: Synthetic oligonucleotide
  Description of Combined DNA/RNA Molecule: Synthetic oligonucleotide
ggcuggagacaggugcgcctt

SEQ ID NO: 990 - DNA, 21 bp, Artificial Sequence
  Description of Artificial Sequence: Synthetic oligonucleotide
  Description of Combined DNA/RNA Molecule: Synthetic oligonucleotide
ggcgcaccugucuccagcctt

SEQ ID NO: 991 - DNA, 21 bp, Artificial Sequence
  Description of Artificial Sequence: Synthetic oligonucleotide
  Description of Combined DNA/RNA Molecule: Synthetic oligonucleotide
gcuggagacaggugcgccctt

SEQ ID NO: 992 - DNA, 21 bp, Artificial Sequence
  Description of Artificial Sequence: Synthetic oligonucleotide
  Description of Combined DNA/RNA Molecule: Synthetic oligonucleotide
gggcgcaccugucuccagctt

SEQ ID NO: 993 - DNA, 21 bp, Artificial Sequence
  Description of Artificial Sequence: Synthetic oligonucleotide
  Description of Combined DNA/RNA Molecule: Synthetic oligonucleotide
uuccugagccaccuuuacutt

SEQ ID NO: 994 - DNA, 21 bp, Artificial Sequence
  Description of Artificial Sequence: Synthetic oligonucleotide
  Description of Combined DNA/RNA Molecule: Synthetic oligonucleotide
aguaaagguggcucaggaatt

SEQ ID NO: 995 - DNA, 21 bp, Artificial Sequence
  Description of Artificial Sequence: Synthetic oligonucleotide
  Description of Combined DNA/RNA Molecule: Synthetic oligonucleotide
uccugagccaccuuuacuctt

SEQ ID NO: 996 - DNA, 21 bp, Artificial Sequence
  Description of Artificial Sequence: Synthetic oligonucleotide
  Description of Combined DNA/RNA Molecule: Synthetic oligonucleotide
gaguaaagguggcucaggatt

SEQ ID NO: 997 - DNA, 21 bp, Artificial Sequence
  Description of Artificial Sequence: Synthetic oligonucleotide
  Description of Combined DNA/RNA Molecule: Synthetic oligonucleotide
ccugagccaccuuuacucutt

SEQ ID NO: 998 - DNA, 21 bp, Artificial Sequence
  Description of Artificial Sequence: Synthetic oligonucleotide
  Description of Combined DNA/RNA Molecule: Synthetic oligonucleotide
agaguaaagguggcucaggtt

SEQ ID NO: 999 - DNA, 21 bp, Artificial Sequence
  Description of Artificial Sequence: Synthetic oligonucleotide
  Description of Combined DNA/RNA Molecule: Synthetic oligonucleotide
ugagccaccuuuacucugctt

SEQ ID NO: 1000 - DNA, 21 bp, Artificial Sequence
  Description of Artificial Sequence: Synthetic oligonucleotide
  Description of Combined DNA/RNA Molecule: Synthetic oligonucleotide
gcagaguaaagguggcucatt

SEQ ID NO: 1001 - DNA, 21 bp, Artificial Sequence
  Description of Artificial Sequence: Synthetic oligonucleotide
  Description of Combined DNA/RNA Molecule: Synthetic oligonucleotide
agccaccuuuacucugcuctt

SEQ ID NO: 1002 - DNA, 21 bp, Artificial Sequence
  Description of Artificial Sequence: Synthetic oligonucleotide
  Description of Combined DNA/RNA Molecule: Synthetic oligonucleotide
gagcagaguaaagguggcutt

SEQ ID NO: 1003 - DNA, 21 bp, Artificial Sequence
  Description of Artificial Sequence: Synthetic oligonucleotide
  Description of Combined DNA/RNA Molecule: Synthetic oligonucleotide
caccuuuacucugcucuautt

SEQ ID NO: 1004 - DNA, 21 bp, Artificial Sequence
  Description of Artificial Sequence: Synthetic oligonucleotide
  Description of Combined DNA/RNA Molecule: Synthetic oligonucleotide
auagagcagaguaaaggugtt

SEQ ID NO: 1005 - DNA, 21 bp, Artificial Sequence
  Description of Artificial Sequence: Synthetic oligonucleotide
  Description of Combined DNA/RNA Molecule: Synthetic oligonucleotide
uacucugcucuaugccaggtt

SEQ ID NO: 1006 - DNA, 21 bp, Artificial Sequence
  Description of Artificial Sequence: Synthetic oligonucleotide
  Description of Combined DNA/RNA Molecule: Synthetic oligonucleotide
ccuggcauagagcagaguatt

SEQ ID NO: 1007 - DNA, 21 bp, Artificial Sequence
  Description of Artificial Sequence: Synthetic oligonucleotide
  Description of Combined DNA/RNA Molecule: Synthetic oligonucleotide
uacucugcucuaugccaggtt

SEQ ID NO: 1008 - DNA, 21 bp, Artificial Sequence
  Description of Artificial Sequence: Synthetic oligonucleotide
  Description of Combined DNA/RNA Molecule: Synthetic oligonucleotide
ccuggcauagagcagaguatt

SEQ ID NO: 1009 - DNA, 21 bp, Artificial Sequence
  Description of Artificial Sequence: Synthetic oligonucleotide
  Description of Combined DNA/RNA Molecule: Synthetic oligonucleotide
augccaggcugugcuagcatt

SEQ ID NO: 1010 - DNA, 21 bp, Artificial Sequence
  Description of Artificial Sequence: Synthetic oligonucleotide
  Description of Combined DNA/RNA Molecule: Synthetic oligonucleotide
ugcuagcacagccuggcautt

SEQ ID NO: 1011 - DNA, 21 bp, Artificial Sequence
  Description of Artificial Sequence: Synthetic oligonucleotide
  Description of Combined DNA/RNA Molecule: Synthetic oligonucleotide
aggcugugcuagcaacacctt

SEQ ID NO: 1012 - DNA, 21 bp, Artificial Sequence
  Description of Artificial Sequence: Synthetic oligonucleotide
  Description of Combined DNA/RNA Molecule: Synthetic oligonucleotide
gguguugcuagcacagccutt

SEQ ID NO: 1013 - DNA, 21 bp, Artificial Sequence
  Description of Artificial Sequence: Synthetic oligonucleotide
  Description of Combined DNA/RNA Molecule: Synthetic oligonucleotide
cugugcuagcaacacccaatt

SEQ ID NO: 1014 - DNA, 21 bp, Artificial Sequence
  Description of Artificial Sequence: Synthetic oligonucleotide
  Description of Combined DNA/RNA Molecule: Synthetic oligonucleotide
uuggguguugcuagcacagtt

SEQ ID NO: 1015 - DNA, 21 bp, Artificial Sequence
  Description of Artificial Sequence: Synthetic oligonucleotide
  Description of Combined DNA/RNA Molecule: Synthetic oligonucleotide
gcuagcaacacccaaaggutt

SEQ ID NO: 1016 - DNA, 21 bp, Artificial Sequence
  Description of Artificial Sequence: Synthetic oligonucleotide
  Description of Combined DNA/RNA Molecule: Synthetic oligonucleotide
accuuuggguguugcuagctt

SEQ ID NO: 1017 - DNA, 21 bp, Artificial Sequence
  Description of Artificial Sequence: Synthetic oligonucleotide
  Description of Combined DNA/RNA Molecule: Synthetic oligonucleotide
ggagccaucaccuaggacutt

SEQ ID NO: 1018 - DNA, 21 bp, Artificial Sequence
  Description of Artificial Sequence: Synthetic oligonucleotide
  Description of Combined DNA/RNA Molecule: Synthetic oligonucleotide
aguccuaggugauggcucctt

SEQ ID NO: 1019 - DNA, 21 bp, Artificial Sequence
  Description of Artificial Sequence: Synthetic oligonucleotide
  Description of Combined DNA/RNA Molecule: Synthetic oligonucleotide
caccuaggacugacucggctt

SEQ ID NO: 1020 - DNA, 21 bp, Artificial Sequence
  Description of Artificial Sequence: Synthetic oligonucleotide
  Description of Combined DNA/RNA Molecule: Synthetic oligonucleotide
gccgagucaguccuaggugtt

SEQ ID NO: 1021 - DNA, 21 bp, Artificial Sequence
  Description of Artificial Sequence: Synthetic oligonucleotide
  Description of Combined DNA/RNA Molecule: Synthetic oligonucleotide
aggacugacucggcagugutt

SEQ ID NO: 1022 - DNA, 21 bp, Artificial Sequence
  Description of Artificial Sequence: Synthetic oligonucleotide
  Description of Combined DNA/RNA Molecule: Synthetic oligonucleotide
acacugccgagucaguccutt

SEQ ID NO: 1023 - DNA, 21 bp, Artificial Sequence
  Description of Artificial Sequence: Synthetic oligonucleotide
  Description of Combined DNA/RNA Molecule: Synthetic oligonucleotide
ggacugacucggcagugugtt

SEQ ID NO: 1024 - DNA, 21 bp, Artificial Sequence
  Description of Artificial Sequence: Synthetic oligonucleotide
  Description of Combined DNA/RNA Molecule: Synthetic oligonucleotide
cacacugccgagucagucctt

SEQ ID NO: 1025 - DNA, 21 bp, Artificial Sequence
  Description of Artificial Sequence: Synthetic oligonucleotide
  Description of Combined DNA/RNA Molecule: Synthetic oligonucleotide
uggugcaugcacugucucatt

SEQ ID NO: 1026 - DNA, 21 bp, Artificial Sequence
  Description of Artificial Sequence: Synthetic oligonucleotide
  Description of Combined DNA/RNA Molecule: Synthetic oligonucleotide
ugagacagugcaugcaccatt

SEQ ID NO: 1027 - DNA, 21 bp, Artificial Sequence
  Description of Artificial Sequence: Synthetic oligonucleotide
  Description of Combined DNA/RNA Molecule: Synthetic oligonucleotide
augcacugucucagccaactt

SEQ ID NO: 1028 - DNA, 21 bp, Artificial Sequence
  Description of Artificial Sequence: Synthetic oligonucleotide
  Description of Combined DNA/RNA Molecule: Synthetic oligonucleotide
guuggcugagacagugcautt

SEQ ID NO: 1029 - DNA, 21 bp, Artificial Sequence
  Description of Artificial Sequence: Synthetic oligonucleotide
  Description of Combined DNA/RNA Molecule: Synthetic oligonucleotide
cugucucagccaacccgcutt

SEQ ID NO: 1030 - DNA, 21 bp, Artificial Sequence
  Description of Artificial Sequence: Synthetic oligonucleotide
  Description of Combined DNA/RNA Molecule: Synthetic oligonucleotide
agcggguuggcugagacagtt

SEQ ID NO: 1031 - DNA, 21 bp, Artificial Sequence
  Description of Artificial Sequence: Synthetic oligonucleotide
  Description of Combined DNA/RNA Molecule: Synthetic oligonucleotide
cucagccaacccgcuccactt

SEQ ID NO: 1032 - DNA, 21 bp, Artificial Sequence
  Description of Artificial Sequence: Synthetic oligonucleotide
  Description of Combined DNA/RNA Molecule: Synthetic oligonucleotide
guggagcggguuggcugagtt

SEQ ID NO: 1033 - DNA, 21 bp, Artificial Sequence
  Description of Artificial Sequence: Synthetic oligonucleotide
  Description of Combined DNA/RNA Molecule: Synthetic oligonucleotide
cucagccaacccgcuccactt

SEQ ID NO: 1034 - DNA, 21 bp, Artificial Sequence
  Description of Artificial Sequence: Synthetic oligonucleotide
  Description of Combined DNA/RNA Molecule: Synthetic oligonucleotide
guggagcggguuggcugagtt

SEQ ID NO: 1035 - DNA, 21 bp, Artificial Sequence
  Description of Artificial Sequence: Synthetic oligonucleotide
  Description of Combined DNA/RNA Molecule: Synthetic oligonucleotide
gccaacccgcuccacuacctt

SEQ ID NO: 1036 - DNA, 21 bp, Artificial Sequence
  Description of Artificial Sequence: Synthetic oligonucleotide
  Description of Combined DNA/RNA Molecule: Synthetic oligonucleotide
gguaguggagcggguuggctt

SEQ ID NO: 1037 - DNA, 21 bp, Artificial Sequence
  Description of Artificial Sequence: Synthetic oligonucleotide
  Description of Combined DNA/RNA Molecule: Synthetic oligonucleotide
gccaacccgcuccacuacctt

SEQ ID NO: 1038 - DNA, 21 bp, Artificial Sequence
  Description of Artificial Sequence: Synthetic oligonucleotide
  Description of Combined DNA/RNA Molecule: Synthetic oligonucleotide
gguaguggagcggguuggctt

SEQ ID NO: 1039 - DNA, 21 bp, Artificial Sequence
  Description of Artificial Sequence: Synthetic oligonucleotide
  Description of Combined DNA/RNA Molecule: Synthetic oligonucleotide
aacccgcuccacuacccggtt

SEQ ID NO: 1040 - DNA, 21 bp, Artificial Sequence
  Description of Artificial Sequence: Synthetic oligonucleotide
  Description of Combined DNA/RNA Molecule: Synthetic oligonucleotide
ccggguaguggagcggguutt

SEQ ID NO: 1041 - DNA, 21 bp, Artificial Sequence
  Description of Artificial Sequence: Synthetic oligonucleotide
  Description of Combined DNA/RNA Molecule: Synthetic oligonucleotide
ccgcuccacuacccggcagtt

SEQ ID NO: 1042 - DNA, 21 bp, Artificial Sequence
  Description of Artificial Sequence: Synthetic oligonucleotide
  Description of Combined DNA/RNA Molecule: Synthetic oligonucleotide
cugccggguaguggagcggtt

SEQ ID NO: 1043 - DNA, 21 bp, Artificial Sequence
  Description of Artificial Sequence: Synthetic oligonucleotide
  Description of Combined DNA/RNA Molecule: Synthetic oligonucleotide
cuacccggcaggguacacatt

SEQ ID NO: 1044 - DNA, 21 bp, Artificial Sequence
  Description of Artificial Sequence: Synthetic oligonucleotide
  Description of Combined DNA/RNA Molecule: Synthetic oligonucleotide
uguguacccugccggguagtt

SEQ ID NO: 1045 - DNA, 21 bp, Artificial Sequence
  Description of Artificial Sequence: Synthetic oligonucleotide
  Description of Combined DNA/RNA Molecule: Synthetic oligonucleotide
uacccggcaggguacacautt

SEQ ID NO: 1046 - DNA, 21 bp, Artificial Sequence
  Description of Artificial Sequence: Synthetic oligonucleotide
  Description of Combined DNA/RNA Molecule: Synthetic oligonucleotide
auguguacccugccggguatt

SEQ ID NO: 1047 - DNA, 21 bp, Artificial Sequence
  Description of Artificial Sequence: Synthetic oligonucleotide
  Description of Combined DNA/RNA Molecule: Synthetic oligonucleotide
acccggcaggguacacauutt

SEQ ID NO: 1048 - DNA, 21 bp, Artificial Sequence
  Description of Artificial Sequence: Synthetic oligonucleotide
  Description of Combined DNA/RNA Molecule: Synthetic oligonucleotide
aauguguacccugccgggutt

SEQ ID NO: 1049 - DNA, 21 bp, Artificial Sequence
  Description of Artificial Sequence: Synthetic oligonucleotide
  Description of Combined DNA/RNA Molecule: Synthetic oligonucleotide
cccggcaggguacacauuctt

SEQ ID NO: 1050 - DNA, 21 bp, Artificial Sequence
  Description of Artificial Sequence: Synthetic oligonucleotide
  Description of Combined DNA/RNA Molecule: Synthetic oligonucleotide
gaauguguacccugccgggtt

SEQ ID NO: 1051 - DNA, 21 bp, Artificial Sequence
  Description of Artificial Sequence: Synthetic oligonucleotide
  Description of Combined DNA/RNA Molecule: Synthetic oligonucleotide
cggcaggguacacauucgctt

SEQ ID NO: 1052 - DNA, 21 bp, Artificial Sequence
  Description of Artificial Sequence: Synthetic oligonucleotide
  Description of Combined DNA/RNA Molecule: Synthetic oligonucleotide
gcgaauguguacccugccgtt

SEQ ID NO: 1053 - DNA, 21 bp, Artificial Sequence
  Description of Artificial Sequence: Synthetic oligonucleotide
  Description of Combined DNA/RNA Molecule: Synthetic oligonucleotide
gcaggguacacauucgcactt

SEQ ID NO: 1054 - DNA, 21 bp, Artificial Sequence
  Description of Artificial Sequence: Synthetic oligonucleotide
  Description of Combined DNA/RNA Molecule: Synthetic oligonucleotide
gugcgaauguguacccugctt

SEQ ID NO: 1055 - DNA, 21 bp, Artificial Sequence
  Description of Artificial Sequence: Synthetic oligonucleotide
  Description of Combined DNA/RNA Molecule: Synthetic oligonucleotide
caggguacacauucgcacctt

SEQ ID NO: 1056 - DNA, 21 bp, Artificial Sequence
  Description of Artificial Sequence: Synthetic oligonucleotide
  Description of Combined DNA/RNA Molecule: Synthetic oligonucleotide
ggugcgaauguguacccugtt

SEQ ID NO: 1057 - DNA, 21 bp, Artificial Sequence
  Description of Artificial Sequence: Synthetic oligonucleotide
  Description of Combined DNA/RNA Molecule: Synthetic oligonucleotide
aggguacacauucgcaccctt

SEQ ID NO: 1058 - DNA, 21 bp, Artificial Sequence
  Description of Artificial Sequence: Synthetic oligonucleotide
  Description of Combined DNA/RNA Molecule: Synthetic oligonucleotide
gggugcgaauguguacccutt

SEQ ID NO: 1059 - DNA, 21 bp, Artificial Sequence
  Description of Artificial Sequence: Synthetic oligonucleotide
  Description of Combined DNA/RNA Molecule: Synthetic oligonucleotide
ggaacugagccagaaacgctt

SEQ ID NO: 1060 - DNA, 21 bp, Artificial Sequence
  Description of Artificial Sequence: Synthetic oligonucleotide
  Description of Combined DNA/RNA Molecule: Synthetic oligonucleotide
gcguuucuggcucaguucctt

SEQ ID NO: 1061 - DNA, 21 bp, Artificial Sequence
  Description of Artificial Sequence: Synthetic oligonucleotide
  Description of Combined DNA/RNA Molecule: Synthetic oligonucleotide
gaacugagccagaaacgcatt

SEQ ID NO: 1062 - DNA, 21 bp, Artificial Sequence
  Description of Artificial Sequence: Synthetic oligonucleotide
  Description of Combined DNA/RNA Molecule: Synthetic oligonucleotide
ugcguuucuggcucaguuctt

SEQ ID NO: 1063 - DNA, 21 bp, Artificial Sequence
  Description of Artificial Sequence: Synthetic oligonucleotide
  Description of Combined DNA/RNA Molecule: Synthetic oligonucleotide
aacugagccagaaacgcagtt

SEQ ID NO: 1064 - DNA, 21 bp, Artificial Sequence
  Description of Artificial Sequence: Synthetic oligonucleotide
  Description of Combined DNA/RNA Molecule: Synthetic oligonucleotide
cugcguuucuggcucaguutt

SEQ ID NO: 1065 - DNA, 21 bp, Artificial Sequence
  Description of Artificial Sequence: Synthetic oligonucleotide
  Description of Combined DNA/RNA Molecule: Synthetic oligonucleotide
ugagccagaaacgcagauutt

SEQ ID NO: 1066 - DNA, 21 bp, Artificial Sequence
  Description of Artificial Sequence: Synthetic oligonucleotide
  Description of Combined DNA/RNA Molecule: Synthetic oligonucleotide
aaucugcguuucuggcucatt

SEQ ID NO: 1067 - DNA, 21 bp, Artificial Sequence
  Description of Artificial Sequence: Synthetic oligonucleotide
  Description of Combined DNA/RNA Molecule: Synthetic oligonucleotide
agaaacgcagauugggcugtt

SEQ ID NO: 1068 - DNA, 21 bp, Artificial Sequence
  Description of Artificial Sequence: Synthetic oligonucleotide
  Description of Combined DNA/RNA Molecule: Synthetic oligonucleotide
cagcccaaucugcguuucutt

SEQ ID NO: 1069 - DNA, 21 bp, Artificial Sequence
  Description of Artificial Sequence: Synthetic oligonucleotide
  Description of Combined DNA/RNA Molecule: Synthetic oligonucleotide
aacgcagauugggcuggcutt

SEQ ID NO: 1070 - DNA, 21 bp, Artificial Sequence
  Description of Artificial Sequence: Synthetic oligonucleotide
  Description of Combined DNA/RNA Molecule: Synthetic oligonucleotide
agccagcccaaucugcguutt

SEQ ID NO: 1071 - DNA, 21 bp, Artificial Sequence
  Description of Artificial Sequence: Synthetic oligonucleotide
  Description of Combined DNA/RNA Molecule: Synthetic oligonucleotide
agccaagccucuucuuacutt

SEQ ID NO: 1072 - DNA, 21 bp, Artificial Sequence
  Description of Artificial Sequence: Synthetic oligonucleotide
  Description of Combined DNA/RNA Molecule: Synthetic oligonucleotide
aguaagaagaggcuuggcutt

SEQ ID NO: 1073 - DNA, 21 bp, Artificial Sequence
  Description of Artificial Sequence: Synthetic oligonucleotide
  Description of Combined DNA/RNA Molecule: Synthetic oligonucleotide
agccaagccucuucuuacutt

SEQ ID NO: 1074 - DNA, 21 bp, Artificial Sequence
  Description of Artificial Sequence: Synthetic oligonucleotide
  Description of Combined DNA/RNA Molecule: Synthetic oligonucleotide
aguaagaagaggcuuggcutt

SEQ ID NO: 1075 - DNA, 21 bp, Artificial Sequence
  Description of Artificial Sequence: Synthetic oligonucleotide
  Description of Combined DNA/RNA Molecule: Synthetic oligonucleotide
agccaagccucuucuuacutt

SEQ ID NO: 1076 - DNA, 21 bp, Artificial Sequence
  Description of Artificial Sequence: Synthetic oligonucleotide
  Description of Combined DNA/RNA Molecule: Synthetic oligonucleotide
aguaagaagaggcuuggcutt

SEQ ID NO: 1077 - DNA, 21 bp, Artificial Sequence
  Description of Artificial Sequence: Synthetic oligonucleotide
  Description of Combined DNA/RNA Molecule: Synthetic oligonucleotide
agccaagccucuucuuacutt

SEQ ID NO: 1078 - DNA, 21 bp, Artificial Sequence
  Description of Artificial Sequence: Synthetic oligonucleotide
  Description of Combined DNA/RNA Molecule: Synthetic oligonucleotide
aguaagaagaggcuuggcutt

SEQ ID NO: 1079 - DNA, 21 bp, Artificial Sequence
  Description of Artificial Sequence: Synthetic oligonucleotide
  Description of Combined DNA/RNA Molecule: Synthetic oligonucleotide
agccaagccucuucuuacutt

SEQ ID NO: 1080 - DNA, 21 bp, Artificial Sequence
  Description of Artificial Sequence: Synthetic oligonucleotide
  Description of Combined DNA/RNA Molecule: Synthetic oligonucleotide
aguaagaagaggcuuggcutt

SEQ ID NO: 1081 - DNA, 21 bp, Artificial Sequence
  Description of Artificial Sequence: Synthetic oligonucleotide
  Description of Combined DNA/RNA Molecule: Synthetic oligonucleotide
agccaagccucuucuuacutt

SEQ ID NO: 1082 - DNA, 21 bp, Artificial Sequence
  Description of Artificial Sequence: Synthetic oligonucleotide
  Description of Combined DNA/RNA Molecule: Synthetic oligonucleotide
aguaagaagaggcuuggcutt

SEQ ID NO: 1083 - DNA, 21 bp, Artificial Sequence
  Description of Artificial Sequence: Synthetic oligonucleotide
  Description of Combined DNA/RNA Molecule: Synthetic oligonucleotide
agccaagccucuucuuacutt

SEQ ID NO: 1084 - DNA, 21 bp, Artificial Sequence
  Description of Artificial Sequence: Synthetic oligonucleotide
  Description of Combined DNA/RNA Molecule: Synthetic oligonucleotide
aguaagaagaggcuuggcutt

SEQ ID NO: 1085 - DNA, 21 bp, Artificial Sequence
  Description of Artificial Sequence: Synthetic oligonucleotide
  Description of Combined DNA/RNA Molecule: Synthetic oligonucleotide
agccaagccucuucuuacutt

SEQ ID NO: 1086 - DNA, 21 bp, Artificial Sequence
  Description of Artificial Sequence: Synthetic oligonucleotide
  Description of Combined DNA/RNA Molecule: Synthetic oligonucleotide
aguaagaagaggcuuggcutt

SEQ ID NO: 1087 - DNA, 21 bp, Artificial Sequence
  Description of Artificial Sequence: Synthetic oligonucleotide
  Description of Combined DNA/RNA Molecule: Synthetic oligonucleotide
agccaagccucuucuuacutt

SEQ ID NO: 1088 - DNA, 21 bp, Artificial Sequence
  Description of Artificial Sequence: Synthetic oligonucleotide
  Description of Combined DNA/RNA Molecule: Synthetic oligonucleotide
aguaagaagaggcuuggcutt

SEQ ID NO: 1089 - DNA, 21 bp, Artificial Sequence
  Description of Artificial Sequence: Synthetic oligonucleotide
  Description of Combined DNA/RNA Molecule: Synthetic oligonucleotide
ugguucccugaggaccagctt

SEQ ID NO: 1090 - DNA, 21 bp, Artificial Sequence
  Description of Artificial Sequence: Synthetic oligonucleotide
  Description of Combined DNA/RNA Molecule: Synthetic oligonucleotide
gcugguccucagggaaccatt

SEQ ID NO: 1091 - DNA, 21 bp, Artificial Sequence
  Description of Artificial Sequence: Synthetic oligonucleotide
  Description of Combined DNA/RNA Molecule: Synthetic oligonucleotide
ugguucccugaggaccagctt

SEQ ID NO: 1092 - DNA, 21 bp, Artificial Sequence
  Description of Artificial Sequence: Synthetic oligonucleotide
  Description of Combined DNA/RNA Molecule: Synthetic oligonucleotide
gcugguccucagggaaccatt

SEQ ID NO: 1093 - DNA, 21 bp, Artificial Sequence
  Description of Artificial Sequence: Synthetic oligonucleotide
  Description of Combined DNA/RNA Molecule: Synthetic oligonucleotide
ugguucccugaggaccagctt

SEQ ID NO: 1094 - DNA, 21 bp, Artificial Sequence
  Description of Artificial Sequence: Synthetic oligonucleotide
  Description of Combined DNA/RNA Molecule: Synthetic oligonucleotide
gcugguccucagggaaccatt

SEQ ID NO: 1095 - DNA, 21 bp, Artificial Sequence
  Description of Artificial Sequence: Synthetic oligonucleotide
  Description of Combined DNA/RNA Molecule: Synthetic oligonucleotide
ugguucccugaggaccagctt

SEQ ID NO: 1096 - DNA, 21 bp, Artificial Sequence
  Description of Artificial Sequence: Synthetic oligonucleotide
  Description of Combined DNA/RNA Molecule: Synthetic oligonucleotide
gcugguccucagggaaccatt

SEQ ID NO: 1097 - DNA, 21 bp, Artificial Sequence
  Description of Artificial Sequence: Synthetic oligonucleotide
  Description of Combined DNA/RNA Molecule: Synthetic oligonucleotide
ugguucccugaggaccagctt

SEQ ID NO: 1098 - DNA, 21 bp, Artificial Sequence
  Description of Artificial Sequence: Synthetic oligonucleotide
  Description of Combined DNA/RNA Molecule: Synthetic oligonucleotide
gcugguccucagggaaccatt

SEQ ID NO: 1099 - DNA, 21 bp, Artificial Sequence
  Description of Artificial Sequence: Synthetic oligonucleotide
  Description of Combined DNA/RNA Molecule: Synthetic oligonucleotide
ugguucccugaggaccagctt

SEQ ID NO: 1100 - DNA, 21 bp, Artificial Sequence
  Description of Artificial Sequence: Synthetic oligonucleotide
  Description of Combined DNA/RNA Molecule: Synthetic oligonucleotide
gcugguccucagggaaccatt

SEQ ID NO: 1101 - DNA, 21 bp, Artificial Sequence
  Description of Artificial Sequence: Synthetic oligonucleotide
  Description of Combined DNA/RNA Molecule: Synthetic oligonucleotide
ugguucccugaggaccagctt

SEQ ID NO: 1102 - DNA, 21 bp, Artificial Sequence
  Description of Artificial Sequence: Synthetic oligonucleotide
  Description of Combined DNA/RNA Molecule: Synthetic oligonucleotide
gcugguccucagggaaccatt

SEQ ID NO: 1103 - DNA, 21 bp, Artificial Sequence
  Description of Artificial Sequence: Synthetic oligonucleotide
  Description of Combined DNA/RNA Molecule: Synthetic oligonucleotide
ucuucuuacuucacccggctt

SEQ ID NO: 1104 - DNA, 21 bp, Artificial Sequence
  Description of Artificial Sequence: Synthetic oligonucleotide
  Description of Combined DNA/RNA Molecule: Synthetic oligonucleotide
gccgggugaaguaagaagatt

SEQ ID NO: 1105 - DNA, 21 bp, Artificial Sequence
  Description of Artificial Sequence: Synthetic oligonucleotide
  Description of Combined DNA/RNA Molecule: Synthetic oligonucleotide
cuucuuacuucacccggcutt

SEQ ID NO: 1106 - DNA, 21 bp, Artificial Sequence
  Description of Artificial Sequence: Synthetic oligonucleotide
  Description of Combined DNA/RNA Molecule: Synthetic oligonucleotide
agccgggugaaguaagaagtt

SEQ ID NO: 1107 - DNA, 21 bp, Artificial Sequence
  Description of Artificial Sequence: Synthetic oligonucleotide
  Description of Combined DNA/RNA Molecule: Synthetic oligonucleotide
uucuuacuucacccggcugtt

SEQ ID NO: 1108 - DNA, 21 bp, Artificial Sequence
  Description of Artificial Sequence: Synthetic oligonucleotide
  Description of Combined DNA/RNA Molecule: Synthetic oligonucleotide
cagccgggugaaguaagaatt

SEQ ID NO: 1109 - DNA, 21 bp, Artificial Sequence
  Description of Artificial Sequence: Synthetic oligonucleotide
  Description of Combined DNA/RNA Molecule: Synthetic oligonucleotide
gggcuccucauuuuuacggtt

SEQ ID NO: 1110 - DNA, 21 bp, Artificial Sequence
  Description of Artificial Sequence: Synthetic oligonucleotide
  Description of Combined DNA/RNA Molecule: Synthetic oligonucleotide
ccguaaaaaugaggagccctt

SEQ ID NO: 1111 - DNA, 21 bp, Artificial Sequence
  Description of Artificial Sequence: Synthetic oligonucleotide
  Description of Combined DNA/RNA Molecule: Synthetic oligonucleotide
ggcuccucauuuuuacgggtt

SEQ ID NO: 1112 - DNA, 21 bp, Artificial Sequence
  Description of Artificial Sequence: Synthetic oligonucleotide
  Description of Combined DNA/RNA Molecule: Synthetic oligonucleotide
cccguaaaaaugaggagcctt

SEQ ID NO: 1113 - DNA, 21 bp, Artificial Sequence
  Description of Artificial Sequence: Synthetic oligonucleotide
  Description of Combined DNA/RNA Molecule: Synthetic oligonucleotide
gcuccucauuuuuacgggutt

SEQ ID NO: 1114 - DNA, 21 bp, Artificial Sequence
  Description of Artificial Sequence: Synthetic oligonucleotide
  Description of Combined DNA/RNA Molecule: Synthetic oligonucleotide
acccguaaaaaugaggagctt

SEQ ID NO: 1115 - DNA, 21 bp, Artificial Sequence
  Description of Artificial Sequence: Synthetic oligonucleotide
  Description of Combined DNA/RNA Molecule: Synthetic oligonucleotide
cuccucauuuuuacggguatt

SEQ ID NO: 1116 - DNA, 21 bp, Artificial Sequence
  Description of Artificial Sequence: Synthetic oligonucleotide
  Description of Combined DNA/RNA Molecule: Synthetic oligonucleotide
uacccguaaaaaugaggagtt

SEQ ID NO: 1117 - DNA, 21 bp, Artificial Sequence
  Description of Artificial Sequence: Synthetic oligonucleotide
  Description of Combined DNA/RNA Molecule: Synthetic oligonucleotide
uccucauuuuuacggguaatt

SEQ ID NO: 1118 - DNA, 21 bp, Artificial Sequence
  Description of Artificial Sequence: Synthetic oligonucleotide
  Description of Combined DNA/RNA Molecule: Synthetic oligonucleotide
uuacccguaaaaaugaggatt

SEQ ID NO: 1119 - DNA, 21 bp, Artificial Sequence
  Description of Artificial Sequence: Synthetic oligonucleotide
  Description of Combined DNA/RNA Molecule: Synthetic oligonucleotide
ccucauuuuuacggguaactt

SEQ ID NO: 1120 - DNA, 21 bp, Artificial Sequence
  Description of Artificial Sequence: Synthetic oligonucleotide
  Description of Combined DNA/RNA Molecule: Synthetic oligonucleotide
guuacccguaaaaaugaggtt

SEQ ID NO: 1121 - DNA, 21 bp, Artificial Sequence
  Description of Artificial Sequence: Synthetic oligonucleotide
  Description of Combined DNA/RNA Molecule: Synthetic oligonucleotide
cucauuuuuacggguaacatt

SEQ ID NO: 1122 - DNA, 21 bp, Artificial Sequence
  Description of Artificial Sequence: Synthetic oligonucleotide
  Description of Combined DNA/RNA Molecule: Synthetic oligonucleotide
uguuacccguaaaaaugagtt

SEQ ID NO: 1123 - DNA, 21 bp, Artificial Sequence
  Description of Artificial Sequence: Synthetic oligonucleotide
  Description of Combined DNA/RNA Molecule: Synthetic oligonucleotide
cauuuuuacggguaacagutt

SEQ ID NO: 1124 - DNA, 21 bp, Artificial Sequence
  Description of Artificial Sequence: Synthetic oligonucleotide
  Description of Combined DNA/RNA Molecule: Synthetic oligonucleotide
acuguuacccguaaaaaugtt

SEQ ID NO: 1125 - DNA, 21 bp, Artificial Sequence
  Description of Artificial Sequence: Synthetic oligonucleotide
  Description of Combined DNA/RNA Molecule: Synthetic oligonucleotide
auuuuuacggguaacagugtt

SEQ ID NO: 1126 - DNA, 21 bp, Artificial Sequence
  Description of Artificial Sequence: Synthetic oligonucleotide
  Description of Combined DNA/RNA Molecule: Synthetic oligonucleotide
cacuguuacccguaaaaautt

SEQ ID NO: 1127 - DNA, 21 bp, Artificial Sequence
  Description of Artificial Sequence: Synthetic oligonucleotide
  Description of Combined DNA/RNA Molecule: Synthetic oligonucleotide
uuuacggguaacagugaggtt

SEQ ID NO: 1128 - DNA, 21 bp, Artificial Sequence
  Description of Artificial Sequence: Synthetic oligonucleotide
  Description of Combined DNA/RNA Molecule: Synthetic oligonucleotide
ccucacuguuacccguaaatt

SEQ ID NO: 1129 - DNA, 21 bp, Artificial Sequence
  Description of Artificial Sequence: Synthetic oligonucleotide
  Description of Combined DNA/RNA Molecule: Synthetic oligonucleotide
cagaccaggaagcucggugtt

SEQ ID NO: 1130 - DNA, 21 bp, Artificial Sequence
  Description of Artificial Sequence: Synthetic oligonucleotide
  Description of Combined DNA/RNA Molecule: Synthetic oligonucleotide
caccgagcuuccuggucugtt

SEQ ID NO: 1131 - DNA, 21 bp, Artificial Sequence
  Description of Artificial Sequence: Synthetic oligonucleotide
  Description of Combined DNA/RNA Molecule: Synthetic oligonucleotide
gaccaggaagcucggugagtt

SEQ ID NO: 1132 - DNA, 21 bp, Artificial Sequence
  Description of Artificial Sequence: Synthetic oligonucleotide
  Description of Combined DNA/RNA Molecule: Synthetic oligonucleotide
cucaccgagcuuccugguctt

SEQ ID NO: 1133 - DNA, 21 bp, Artificial Sequence
  Description of Artificial Sequence: Synthetic oligonucleotide
  Description of Combined DNA/RNA Molecule: Synthetic oligonucleotide
ccaggaagcucggugagugtt

SEQ ID NO: 1134 - DNA, 21 bp, Artificial Sequence
  Description of Artificial Sequence: Synthetic oligonucleotide
  Description of Combined DNA/RNA Molecule: Synthetic oligonucleotide
cacucaccgagcuuccuggtt

SEQ ID NO: 1135 - DNA, 21 bp, Artificial Sequence
  Description of Artificial Sequence: Synthetic oligonucleotide
  Description of Combined DNA/RNA Molecule: Synthetic oligonucleotide
ggaagcucggugagugaugtt

SEQ ID NO: 1136 - DNA, 21 bp, Artificial Sequence
  Description of Artificial Sequence: Synthetic oligonucleotide
  Description of Combined DNA/RNA Molecule: Synthetic oligonucleotide
caucacucaccgagcuucctt

SEQ ID NO: 1137 - DNA, 21 bp, Artificial Sequence
  Description of Artificial Sequence: Synthetic oligonucleotide
  Description of Combined DNA/RNA Molecule: Synthetic oligonucleotide
gugagugauggcagaacgatt

SEQ ID NO: 1138 - DNA, 21 bp, Artificial Sequence
  Description of Artificial Sequence: Synthetic oligonucleotide
  Description of Combined DNA/RNA Molecule: Synthetic oligonucleotide
ucguucugccaucacucactt

SEQ ID NO: 1139 - DNA, 21 bp, Artificial Sequence
  Description of Artificial Sequence: Synthetic oligonucleotide
  Description of Combined DNA/RNA Molecule: Synthetic oligonucleotide
gagugauggcagaacgaugtt

SEQ ID NO: 1140 - DNA, 21 bp, Artificial Sequence
  Description of Artificial Sequence: Synthetic oligonucleotide
  Description of Combined DNA/RNA Molecule: Synthetic oligonucleotide
caucguucugccaucacuctt

SEQ ID NO: 1141 - DNA, 21 bp, Artificial Sequence
  Description of Artificial Sequence: Synthetic oligonucleotide
  Description of Combined DNA/RNA Molecule: Synthetic oligonucleotide
gauggcagaacgaugccugtt

SEQ ID NO: 1142 - DNA, 21 bp, Artificial Sequence
  Description of Artificial Sequence: Synthetic oligonucleotide
  Description of Combined DNA/RNA Molecule: Synthetic oligonucleotide
caggcaucguucugccauctt

SEQ ID NO: 1143 - DNA, 21 bp, Artificial Sequence
  Description of Artificial Sequence: Synthetic oligonucleotide
  Description of Combined DNA/RNA Molecule: Synthetic oligonucleotide
agaacgaugccugcaggcatt

SEQ ID NO: 1144 - DNA, 21 bp, Artificial Sequence
  Description of Artificial Sequence: Synthetic oligonucleotide
  Description of Combined DNA/RNA Molecule: Synthetic oligonucleotide
ugccugcaggcaucguucutt

SEQ ID NO: 1145 - DNA, 21 bp, Artificial Sequence
  Description of Artificial Sequence: Synthetic oligonucleotide
  Description of Combined DNA/RNA Molecule: Synthetic oligonucleotide
acgaugccugcaggcauggtt

SEQ ID NO: 1146 - DNA, 21 bp, Artificial Sequence
  Description of Artificial Sequence: Synthetic oligonucleotide
  Description of Combined DNA/RNA Molecule: Synthetic oligonucleotide
ccaugccugcaggcaucgutt

SEQ ID NO: 1147 - DNA, 21 bp, Artificial Sequence
  Description of Artificial Sequence: Synthetic oligonucleotide
  Description of Combined DNA/RNA Molecule: Synthetic oligonucleotide
gcaggcauggaacuuuuuctt

SEQ ID NO: 1148 - DNA, 21 bp, Artificial Sequence
  Description of Artificial Sequence: Synthetic oligonucleotide
  Description of Combined DNA/RNA Molecule: Synthetic oligonucleotide
gaaaaaguuccaugccugctt

SEQ ID NO: 1149 - DNA, 21 bp, Artificial Sequence
  Description of Artificial Sequence: Synthetic oligonucleotide
  Description of Combined DNA/RNA Molecule: Synthetic oligonucleotide
ggaacuuuuuccguuaucatt

SEQ ID NO: 1150 - DNA, 21 bp, Artificial Sequence
  Description of Artificial Sequence: Synthetic oligonucleotide
  Description of Combined DNA/RNA Molecule: Synthetic oligonucleotide
ugauaacggaaaaaguucctt

SEQ ID NO: 1151 - DNA, 21 bp, Artificial Sequence
  Description of Artificial Sequence: Synthetic oligonucleotide
  Description of Combined DNA/RNA Molecule: Synthetic oligonucleotide
gaacuuuuuccguuaucactt

SEQ ID NO: 1152 - DNA, 21 bp, Artificial Sequence
  Description of Artificial Sequence: Synthetic oligonucleotide
  Description of Combined DNA/RNA Molecule: Synthetic oligonucleotide
gugauaacggaaaaaguuctt

SEQ ID NO: 1153 - DNA, 21 bp, Artificial Sequence
  Description of Artificial Sequence: Synthetic oligonucleotide
  Description of Combined DNA/RNA Molecule: Synthetic oligonucleotide
aacuuuuuccguuaucacctt

SEQ ID NO: 1154 - DNA, 21 bp, Artificial Sequence
  Description of Artificial Sequence: Synthetic oligonucleotide
  Description of Combined DNA/RNA Molecule: Synthetic oligonucleotide
ggugauaacggaaaaaguutt

SEQ ID NO: 1155 - DNA, 21 bp, Artificial Sequence
  Description of Artificial Sequence: Synthetic oligonucleotide
  Description of Combined DNA/RNA Molecule: Synthetic oligonucleotide
uaucacccaggccugauuctt

SEQ ID NO: 1156 - DNA, 21 bp, Artificial Sequence
  Description of Artificial Sequence: Synthetic oligonucleotide
  Description of Combined DNA/RNA Molecule: Synthetic oligonucleotide
gaaucaggccugggugauatt

SEQ ID NO: 1157 - DNA, 21 bp, Artificial Sequence
  Description of Artificial Sequence: Synthetic oligonucleotide
  Description of Combined DNA/RNA Molecule: Synthetic oligonucleotide
aggccugauucacuggccutt

SEQ ID NO: 1158 - DNA, 21 bp, Artificial Sequence
  Description of Artificial Sequence: Synthetic oligonucleotide
  Description of Combined DNA/RNA Molecule: Synthetic oligonucleotide
aggccagugaaucaggccutt

SEQ ID NO: 1159 - DNA, 21 bp, Artificial Sequence
  Description of Artificial Sequence: Synthetic oligonucleotide
  Description of Combined DNA/RNA Molecule: Synthetic oligonucleotide
ugauucacuggccuggcggtt

SEQ ID NO: 1160 - DNA, 21 bp, Artificial Sequence
  Description of Artificial Sequence: Synthetic oligonucleotide
  Description of Combined DNA/RNA Molecule: Synthetic oligonucleotide
ccgccaggccagugaaucatt

SEQ ID NO: 1161 - DNA, 21 bp, Artificial Sequence
  Description of Artificial Sequence: Synthetic oligonucleotide
  Description of Combined DNA/RNA Molecule: Synthetic oligonucleotide
auucacuggccuggcggagtt

SEQ ID NO: 1162 - DNA, 21 bp, Artificial Sequence
  Description of Artificial Sequence: Synthetic oligonucleotide
  Description of Combined DNA/RNA Molecule: Synthetic oligonucleotide
cuccgccaggccagugaautt

SEQ ID NO: 1163 - DNA, 21 bp, Artificial Sequence
  Description of Artificial Sequence: Synthetic oligonucleotide
  Description of Combined DNA/RNA Molecule: Synthetic oligonucleotide
gcuucuaaggcauggucggtt

SEQ ID NO: 1164 - DNA, 21 bp, Artificial Sequence
  Description of Artificial Sequence: Synthetic oligonucleotide
  Description of Combined DNA/RNA Molecule: Synthetic oligonucleotide
ccgaccaugccuuagaagctt

SEQ ID NO: 1165 - DNA, 21 bp, Artificial Sequence
  Description of Artificial Sequence: Synthetic oligonucleotide
  Description of Combined DNA/RNA Molecule: Synthetic oligonucleotide
cuucuaaggcauggucgggtt

SEQ ID NO: 1166 - DNA, 21 bp, Artificial Sequence
  Description of Artificial Sequence: Synthetic oligonucleotide
  Description of Combined DNA/RNA Molecule: Synthetic oligonucleotide
cccgaccaugccuuagaagtt

SEQ ID NO: 1167 - DNA, 21 bp, Artificial Sequence
  Description of Artificial Sequence: Synthetic oligonucleotide
  Description of Combined DNA/RNA Molecule: Synthetic oligonucleotide
gagggccaacaacuguccctt

SEQ ID NO: 1168 - DNA, 21 bp, Artificial Sequence
  Description of Artificial Sequence: Synthetic oligonucleotide
  Description of Combined DNA/RNA Molecule: Synthetic oligonucleotide
gggacaguuguuggcccuctt

SEQ ID NO: 1169 - DNA, 21 bp, Artificial Sequence
  Description of Artificial Sequence: Synthetic oligonucleotide
  Description of Combined DNA/RNA Molecule: Synthetic oligonucleotide
acugucccuccuugagcactt

SEQ ID NO: 1170 - DNA, 21 bp, Artificial Sequence
  Description of Artificial Sequence: Synthetic oligonucleotide
  Description of Combined DNA/RNA Molecule: Synthetic oligonucleotide
gugcucaaggagggacagutt

SEQ ID NO: 1171 - DNA, 21 bp, Artificial Sequence
  Description of Artificial Sequence: Synthetic oligonucleotide
  Description of Combined DNA/RNA Molecule: Synthetic oligonucleotide
acugucccuccuugagcactt

SEQ ID NO: 1172 - DNA, 21 bp, Artificial Sequence
  Description of Artificial Sequence: Synthetic oligonucleotide
  Description of Combined DNA/RNA Molecule: Synthetic oligonucleotide
gugcucaaggagggacagutt

SEQ ID NO: 1173 - DNA, 21 bp, Artificial Sequence
  Description of Artificial Sequence: Synthetic oligonucleotide
  Description of Combined DNA/RNA Molecule: Synthetic oligonucleotide
cugucccuccuugagcacctt

SEQ ID NO: 1174 - DNA, 21 bp, Artificial Sequence
  Description of Artificial Sequence: Synthetic oligonucleotide
  Description of Combined DNA/RNA Molecule: Synthetic oligonucleotide
ggugcucaaggagggacagtt

SEQ ID NO: 1175 - DNA, 21 bp, Artificial Sequence
  Description of Artificial Sequence: Synthetic oligonucleotide
  Description of Combined DNA/RNA Molecule: Synthetic oligonucleotide
cugucccuccuugagcacctt

SEQ ID NO: 1176 - DNA, 21 bp, Artificial Sequence
  Description of Artificial Sequence: Synthetic oligonucleotide
  Description of Combined DNA/RNA Molecule: Synthetic oligonucleotide
ggugcucaaggagggacagtt

SEQ ID NO: 1177 - DNA, 21 bp, Artificial Sequence
  Description of Artificial Sequence: Synthetic oligonucleotide
  Description of Combined DNA/RNA Molecule: Synthetic oligonucleotide
acauuuaucuuuugggucutt

SEQ ID NO: 1178 - DNA, 21 bp, Artificial Sequence
  Description of Artificial Sequence: Synthetic oligonucleotide
  Description of Combined DNA/RNA Molecule: Synthetic oligonucleotide
agacccaaaagauaaaugutt

SEQ ID NO: 1179 - DNA, 21 bp, Artificial Sequence
  Description of Artificial Sequence: Synthetic oligonucleotide
  Description of Combined DNA/RNA Molecule: Synthetic oligonucleotide
acauuuaucuuuugggucutt

SEQ ID NO: 1180 - DNA, 21 bp, Artificial Sequence
  Description of Artificial Sequence: Synthetic oligonucleotide
  Description of Combined DNA/RNA Molecule: Synthetic oligonucleotide
agacccaaaagauaaaugutt

SEQ ID NO: 1181 - DNA, 21 bp, Artificial Sequence
  Description of Artificial Sequence: Synthetic oligonucleotide
  Description of Combined DNA/RNA Molecule: Synthetic oligonucleotide
acauuuaucuuuugggucutt

SEQ ID NO: 1182 - DNA, 21 bp, Artificial Sequence
  Description of Artificial Sequence: Synthetic oligonucleotide
  Description of Combined DNA/RNA Molecule: Synthetic oligonucleotide
agacccaaaagauaaaugutt

SEQ ID NO: 1183 - DNA, 21 bp, Artificial Sequence
  Description of Artificial Sequence: Synthetic oligonucleotide
  Description of Combined DNA/RNA Molecule: Synthetic oligonucleotide
acauuuaucuuuugggucutt

SEQ ID NO: 1184 - DNA, 21 bp, Artificial Sequence
  Description of Artificial Sequence: Synthetic oligonucleotide
  Description of Combined DNA/RNA Molecule: Synthetic oligonucleotide
agacccaaaagauaaaugutt

SEQ ID NO: 1185 - DNA, 21 bp, Artificial Sequence
  Description of Artificial Sequence: Synthetic oligonucleotide
  Description of Combined DNA/RNA Molecule: Synthetic oligonucleotide
acauuuaucuuuugggucutt

SEQ ID NO: 1186 - DNA, 21 bp, Artificial Sequence
  Description of Artificial Sequence: Synthetic oligonucleotide
  Description of Combined DNA/RNA Molecule: Synthetic oligonucleotide
agacccaaaagauaaaugutt

SEQ ID NO: 1187 - DNA, 21 bp, Artificial Sequence
  Description of Artificial Sequence: Synthetic oligonucleotide
  Description of Combined DNA/RNA Molecule: Synthetic oligonucleotide
acauuuaucuuuugggucutt

SEQ ID NO: 1188 - DNA, 21 bp, Artificial Sequence
  Description of Artificial Sequence: Synthetic oligonucleotide
  Description of Combined DNA/RNA Molecule: Synthetic oligonucleotide
agacccaaaagauaaaugutt

SEQ ID NO: 1189 - DNA, 21 bp, Artificial Sequence
  Description of Artificial Sequence: Synthetic oligonucleotide
  Description of Combined DNA/RNA Molecule: Synthetic oligonucleotide
acauuuaucuuuugggucutt

SEQ ID NO: 1190 - DNA, 21 bp, Artificial Sequence
  Description of Artificial Sequence: Synthetic oligonucleotide
  Description of Combined DNA/RNA Molecule: Synthetic oligonucleotide
agacccaaaagauaaaugutt

SEQ ID NO: 1191 - DNA, 21 bp, Artificial Sequence
  Description of Artificial Sequence: Synthetic oligonucleotide
  Description of Combined DNA/RNA Molecule: Synthetic oligonucleotide
acauuuaucuuuugggucutt

SEQ ID NO: 1192 - DNA, 21 bp, Artificial Sequence
  Description of Artificial Sequence: Synthetic oligonucleotide
  Description of Combined DNA/RNA Molecule: Synthetic oligonucleotide
agacccaaaagauaaaugutt

SEQ ID NO: 1193 - DNA, 21 bp, Artificial Sequence
  Description of Artificial Sequence: Synthetic oligonucleotide
  Description of Combined DNA/RNA Molecule: Synthetic oligonucleotide
acauuuaucuuuugggucutt

SEQ ID NO: 1194 - DNA, 21 bp, Artificial Sequence
  Description of Artificial Sequence: Synthetic oligonucleotide
  Description of Combined DNA/RNA Molecule: Synthetic oligonucleotide
agacccaaaagauaaaugutt

SEQ ID NO: 1195 - DNA, 21 bp, Artificial Sequence
  Description of Artificial Sequence: Synthetic oligonucleotide
  Description of Combined DNA/RNA Molecule: Synthetic oligonucleotide
gccaucugcugccggagcctt

SEQ ID NO: 1196 - DNA, 21 bp, Artificial Sequence
  Description of Artificial Sequence: Synthetic oligonucleotide
  Description of Combined DNA/RNA Molecule: Synthetic oligonucleotide
ggcuccggcagcagauggctt

SEQ ID NO: 1197 - DNA, 21 bp, Artificial Sequence
  Description of Artificial Sequence: Synthetic oligonucleotide
  Description of Combined DNA/RNA Molecule: Synthetic oligonucleotide
gccaucugcugccggagcctt

SEQ ID NO: 1198 - DNA, 21 bp, Artificial Sequence
  Description of Artificial Sequence: Synthetic oligonucleotide
  Description of Combined DNA/RNA Molecule: Synthetic oligonucleotide
ggcuccggcagcagauggctt

SEQ ID NO: 1199 - DNA, 21 bp, Artificial Sequence
  Description of Artificial Sequence: Synthetic oligonucleotide
  Description of Combined DNA/RNA Molecule: Synthetic oligonucleotide
gccaucugcugccggagcctt

SEQ ID NO: 1200 - DNA, 21 bp, Artificial Sequence
  Description of Artificial Sequence: Synthetic oligonucleotide
  Description of Combined DNA/RNA Molecule: Synthetic oligonucleotide
ggcuccggcagcagauggctt

SEQ ID NO: 1201 - DNA, 21 bp, Artificial Sequence
  Description of Artificial Sequence: Synthetic oligonucleotide
  Description of Combined DNA/RNA Molecule: Synthetic oligonucleotide
gccaucugcugccggagcctt

SEQ ID NO: 1202 - DNA, 21 bp, Artificial Sequence
  Description of Artificial Sequence: Synthetic oligonucleotide
  Description of Combined DNA/RNA Molecule: Synthetic oligonucleotide
ggcuccggcagcagauggctt

SEQ ID NO: 1203 - DNA, 21 bp, Artificial Sequence
  Description of Artificial Sequence: Synthetic oligonucleotide
  Description of Combined DNA/RNA Molecule: Synthetic oligonucleotide
gccaucugcugccggagcctt

SEQ ID NO: 1204 - DNA, 21 bp, Artificial Sequence
  Description of Artificial Sequence: Synthetic oligonucleotide
  Description of Combined DNA/RNA Molecule: Synthetic oligonucleotide
ggcucaugcagcagauggctt

SEQ ID NO: 1205 - DNA, 21 bp, Artificial Sequence
  Description of Artificial Sequence: Synthetic oligonucleotide
  Description of Combined DNA/RNA Molecule: Synthetic oligonucleotide
gccaucugcugccggagcctt

SEQ ID NO: 1206 - DNA, 21 bp, Artificial Sequence
  Description of Artificial Sequence: Synthetic oligonucleotide
  Description of Combined DNA/RNA Molecule: Synthetic oligonucleotide
ggcucaugcagcagauggctt

SEQ ID NO: 1207 - DNA, 21 bp, Artificial Sequence
  Description of Artificial Sequence: Synthetic oligonucleotide
  Description of Combined DNA/RNA Molecule: Synthetic oligonucleotide
gccaucugcugccggagcctt

SEQ ID NO: 1208 - DNA, 21 bp, Artificial Sequence
  Description of Artificial Sequence: Synthetic oligonucleotide
  Description of Combined DNA/RNA Molecule: Synthetic oligonucleotide
ggcucaugcagcagauggctt

SEQ ID NO: 1209 - DNA, 21 bp, Artificial Sequence
  Description of Artificial Sequence: Synthetic oligonucleotide
  Description of Combined DNA/RNA Molecule: Synthetic oligonucleotide
cauuuaucuuuugggucugtt

SEQ ID NO: 1210 - DNA, 21 bp, Artificial Sequence
  Description of Artificial Sequence: Synthetic oligonucleotide
  Description of Combined DNA/RNA Molecule: Synthetic oligonucleotide
cagacccaaaagauaaaugtt

SEQ ID NO: 1211 - DNA, 21 bp, Artificial Sequence
  Description of Artificial Sequence: Synthetic oligonucleotide
  Description of Combined DNA/RNA Molecule: Synthetic oligonucleotide
cauuuaucuuuugggucugtt

SEQ ID NO: 1212 - DNA, 21 bp, Artificial Sequence
  Description of Artificial Sequence: Synthetic oligonucleotide
  Description of Combined DNA/RNA Molecule: Synthetic oligonucleotide
cagacccaaaagauaaaugtt

SEQ ID NO: 1213 - DNA, 21 bp, Artificial Sequence
  Description of Artificial Sequence: Synthetic oligonucleotide
  Description of Combined DNA/RNA Molecule: Synthetic oligonucleotide
uaucuuuugggucuguccutt

SEQ ID NO: 1214 - DNA, 21 bp, Artificial Sequence
  Description of Artificial Sequence: Synthetic oligonucleotide
  Description of Combined DNA/RNA Molecule: Synthetic oligonucleotide
aggacagacccaaaagauatt

SEQ ID NO: 1215 - DNA, 21 bp, Artificial Sequence
  Description of Artificial Sequence: Synthetic oligonucleotide
  Description of Combined DNA/RNA Molecule: Synthetic oligonucleotide
uaucuuuugggucuguccutt

SEQ ID NO: 1216 - DNA, 21 bp, Artificial Sequence
  Description of Artificial Sequence: Synthetic oligonucleotide
  Description of Combined DNA/RNA Molecule: Synthetic oligonucleotide
aggacagacccaaaagauatt

SEQ ID NO: 1217 - DNA, 21 bp, Artificial Sequence
  Description of Artificial Sequence: Synthetic oligonucleotide
  Description of Combined DNA/RNA Molecule: Synthetic oligonucleotide
cucuguugccuuuuuacagtt

SEQ ID NO: 1218 - DNA, 21 bp, Artificial Sequence
  Description of Artificial Sequence: Synthetic oligonucleotide
  Description of Combined DNA/RNA Molecule: Synthetic oligonucleotide
cuguaaaaaggcaacagagtt

SEQ ID NO: 1219 - DNA, 21 bp, Artificial Sequence
  Description of Artificial Sequence: Synthetic oligonucleotide
  Description of Combined DNA/RNA Molecule: Synthetic oligonucleotide
cucuguugccuuuuuacagtt

SEQ ID NO: 1220 - DNA, 21 bp, Artificial Sequence
  Description of Artificial Sequence: Synthetic oligonucleotide
  Description of Combined DNA/RNA Molecule: Synthetic oligonucleotide
cuguaaaaaggcaacagagtt

SEQ ID NO: 1221 - DNA, 21 bp, Artificial Sequence
  Description of Artificial Sequence: Synthetic oligonucleotide
  Description of Combined DNA/RNA Molecule: Synthetic oligonucleotide
ccuuuuuacagccaacuuutt

SEQ ID NO: 1222 - DNA, 21 bp, Artificial Sequence
  Description of Artificial Sequence: Synthetic oligonucleotide
  Description of Combined DNA/RNA Molecule: Synthetic oligonucleotide
aaaguuggcuguaaaaaggtt

SEQ ID NO: 1223 - DNA, 21 bp, Artificial Sequence
  Description of Artificial Sequence: Synthetic oligonucleotide
  Description of Combined DNA/RNA Molecule: Synthetic oligonucleotide
agccaacuuuucuagaccutt

SEQ ID NO: 1224 - DNA, 21 bp, Artificial Sequence
  Description of Artificial Sequence: Synthetic oligonucleotide
  Description of Combined DNA/RNA Molecule: Synthetic oligonucleotide
aggucuagaaaaguuggcutt

SEQ ID NO: 1225 - DNA, 21 bp, Artificial Sequence
  Description of Artificial Sequence: Synthetic oligonucleotide
  Description of Combined DNA/RNA Molecule: Synthetic oligonucleotide
acuuuucuagaccuguuuutt

SEQ ID NO: 1226 - DNA, 21 bp, Artificial Sequence
  Description of Artificial Sequence: Synthetic oligonucleotide
  Description of Combined DNA/RNA Molecule: Synthetic oligonucleotide
aaaacaggucuagaaaagutt

SEQ ID NO: 1227 - DNA, 21 bp, Artificial Sequence
  Description of Artificial Sequence: Synthetic oligonucleotide
  Description of Combined DNA/RNA Molecule: Synthetic oligonucleotide
uucuagaccuguuuugcuutt

SEQ ID NO: 1228 - DNA, 21 bp, Artificial Sequence
  Description of Artificial Sequence: Synthetic oligonucleotide
  Description of Combined DNA/RNA Molecule: Synthetic oligonucleotide
aagcaaaacaggucuagaatt

SEQ ID NO: 1229 - DNA, 21 bp, Artificial Sequence
  Description of Artificial Sequence: Synthetic oligonucleotide
  Description of Combined DNA/RNA Molecule: Synthetic oligonucleotide
uucuagaccuguuuugcuutt

SEQ ID NO: 1230 - DNA, 21 bp, Artificial Sequence
  Description of Artificial Sequence: Synthetic oligonucleotide
  Description of Combined DNA/RNA Molecule: Synthetic oligonucleotide
aagcaaaacaggucuagaatt

SEQ ID NO: 1231 - DNA, 21 bp, Artificial Sequence
  Description of Artificial Sequence: Synthetic oligonucleotide
  Description of Combined DNA/RNA Molecule: Synthetic oligonucleotide
uucuagaccuguuuugcuutt

SEQ ID NO: 1232 - DNA, 21 bp, Artificial Sequence
  Description of Artificial Sequence: Synthetic oligonucleotide
  Description of Combined DNA/RNA Molecule: Synthetic oligonucleotide
aagcaaaacaggucuagaatt

SEQ ID NO: 1233 - DNA, 21 bp, Artificial Sequence
  Description of Artificial Sequence: Synthetic oligonucleotide
  Description of Combined DNA/RNA Molecule: Synthetic oligonucleotide
uucuagaccuguuuugcuutt

SEQ ID NO: 1234 - DNA, 21 bp, Artificial Sequence
  Description of Artificial Sequence: Synthetic oligonucleotide
  Description of Combined DNA/RNA Molecule: Synthetic oligonucleotide
aagcaaaacaggucuagaatt

SEQ ID NO: 1235 - DNA, 21 bp, Artificial Sequence
  Description of Artificial Sequence: Synthetic oligonucleotide
  Description of Combined DNA/RNA Molecule: Synthetic oligonucleotide
uucuagaccuguuuugcuutt

SEQ ID NO: 1236 - DNA, 21 bp, Artificial Sequence
  Description of Artificial Sequence: Synthetic oligonucleotide
  Description of Combined DNA/RNA Molecule: Synthetic oligonucleotide
aagcaaaacaggucuagaatt

SEQ ID NO: 1237 - DNA, 21 bp, Artificial Sequence
  Description of Artificial Sequence: Synthetic oligonucleotide
  Description of Combined DNA/RNA Molecule: Synthetic oligonucleotide
uucuagaccuguuuugcuutt

SEQ ID NO: 1238 - DNA, 21 bp, Artificial Sequence
  Description of Artificial Sequence: Synthetic oligonucleotide
  Description of Combined DNA/RNA Molecule: Synthetic oligonucleotide
aagcaaaacaggucuagaatt

SEQ ID NO: 1239 - DNA, 20 bp, Artificial Sequence
  Description of Artificial Sequence: Synthetic oligonucleotide
  Description of Combined DNA/RNA Molecule: Synthetic oligonucleotide
uucuagaccuguuuucuutt

SEQ ID NO: 1240 - DNA, 21 bp, Artificial Sequence
  Description of Artificial Sequence: Synthetic oligonucleotide
  Description of Combined DNA/RNA Molecule: Synthetic oligonucleotide
aagcaaaacaggucuagaatt

SEQ ID NO: 1241 - DNA, 21 bp, Artificial Sequence
  Description of Artificial Sequence: Synthetic oligonucleotide
  Description of Combined DNA/RNA Molecule: Synthetic oligonucleotide
uucuagaccuguuuugcuutt

SEQ ID NO: 1242 - DNA, 21 bp, Artificial Sequence
  Description of Artificial Sequence: Synthetic oligonucleotide
  Description of Combined DNA/RNA Molecule: Synthetic oligonucleotide
aagcaaaacaggucuagaatt

SEQ ID NO: 1243 - DNA, 21 bp, Artificial Sequence
  Description of Artificial Sequence: Synthetic oligonucleotide
  Description of Combined DNA/RNA Molecule: Synthetic oligonucleotide
uucuagaccuguuuugcuutt

SEQ ID NO: 1244 - DNA, 21 bp, Artificial Sequence
  Description of Artificial Sequence: Synthetic oligonucleotide
  Description of Combined DNA/RNA Molecule: Synthetic oligonucleotide
aagcaaaacaggucuagaatt

SEQ ID NO: 1245 - DNA, 21 bp, Artificial Sequence
  Description of Artificial Sequence: Synthetic oligonucleotide
  Description of Combined DNA/RNA Molecule: Synthetic oligonucleotide
cauaggccuggaguuuauutt

SEQ ID NO: 1246 - DNA, 21 bp, Artificial Sequence
  Description of Artificial Sequence: Synthetic oligonucleotide
  Description of Combined DNA/RNA Molecule: Synthetic oligonucleotide
aauaaacuccaggccuaugtt

SEQ ID NO: 1247 - DNA, 21 bp, Artificial Sequence
  Description of Artificial Sequence: Synthetic oligonucleotide
  Description of Combined DNA/RNA Molecule: Synthetic oligonucleotide
cauaggccuggaguuuauutt

SEQ ID NO: 1248 - DNA, 21 bp, Artificial Sequence
  Description of Artificial Sequence: Synthetic oligonucleotide
  Description of Combined DNA/RNA Molecule: Synthetic oligonucleotide
aauaaacuccaggccuaugtt

SEQ ID NO: 1249 - DNA, 21 bp, Artificial Sequence
  Description of Artificial Sequence: Synthetic oligonucleotide
  Description of Combined DNA/RNA Molecule: Synthetic oligonucleotide
cauaggccuggaguuuauutt

SEQ ID NO: 1250 - DNA, 21 bp, Artificial Sequence
  Description of Artificial Sequence: Synthetic oligonucleotide
  Description of Combined DNA/RNA Molecule: Synthetic oligonucleotide
aauaaacuccaggccuaugtt

SEQ ID NO: 1251 - DNA, 21 bp, Artificial Sequence
  Description of Artificial Sequence: Synthetic oligonucleotide
  Description of Combined DNA/RNA Molecule: Synthetic oligonucleotide
cauaggccuggaguuuauutt

SEQ ID NO: 1252 - DNA, 21 bp, Artificial Sequence
  Description of Artificial Sequence: Synthetic oligonucleotide
  Description of Combined DNA/RNA Molecule: Synthetic oligonucleotide
aauaaacuccaggccuaugtt

SEQ ID NO: 1253 - DNA, 21 bp, Artificial Sequence
  Description of Artificial Sequence: Synthetic oligonucleotide
  Description of Combined DNA/RNA Molecule: Synthetic oligonucleotide
cauaggccuggaguuuauutt

SEQ ID NO: 1254 - DNA, 21 bp, Artificial Sequence
  Description of Artificial Sequence: Synthetic oligonucleotide
  Description of Combined DNA/RNA Molecule: Synthetic oligonucleotide
aauaaacuccaggccuaugtt

SEQ ID NO: 1255 - DNA, 21 bp, Artificial Sequence
  Description of Artificial Sequence: Synthetic oligonucleotide
  Description of Combined DNA/RNA Molecule: Synthetic oligonucleotide
cauaggccuggaguuuauutt

SEQ ID NO: 1256 - DNA, 21 bp, Artificial Sequence
  Description of Artificial Sequence: Synthetic oligonucleotide
  Description of Combined DNA/RNA Molecule: Synthetic oligonucleotide
aauaaacuccaggccuaugtt

SEQ ID NO: 1257 - DNA, 21 bp, Artificial Sequence
  Description of Artificial Sequence: Synthetic oligonucleotide
  Description of Combined DNA/RNA Molecule: Synthetic oligonucleotide
cauaggccuggaguuuauutt

SEQ ID NO: 1258 - DNA, 21 bp, Artificial Sequence
  Description of Artificial Sequence: Synthetic oligonucleotide
  Description of Combined DNA/RNA Molecule: Synthetic oligonucleotide
aauaaacuccaggccuaugtt

SEQ ID NO: 1259 - DNA, 21 bp, Artificial Sequence
  Description of Artificial Sequence: Synthetic oligonucleotide
  Description of Combined DNA/RNA Molecule: Synthetic oligonucleotide
ucuagaccuguuuugcuuutt

SEQ ID NO: 1260 - DNA, 21 bp, Artificial Sequence
  Description of Artificial Sequence: Synthetic oligonucleotide
  Description of Combined DNA/RNA Molecule: Synthetic oligonucleotide
aaagcaaaacaggucuagatt

SEQ ID NO: 1261 - DNA, 21 bp, Artificial Sequence
  Description of Artificial Sequence: Synthetic oligonucleotide
  Description of Combined DNA/RNA Molecule: Synthetic oligonucleotide
ucuagaccuguuuugcuuutt

SEQ ID NO: 1262 - DNA, 21 bp, Artificial Sequence
  Description of Artificial Sequence: Synthetic oligonucleotide
  Description of Combined DNA/RNA Molecule: Synthetic oligonucleotide
aaagcaaaacaggucuagatt

SEQ ID NO: 1263 - DNA, 21 bp, Artificial Sequence
  Description of Artificial Sequence: Synthetic oligonucleotide
  Description of Combined DNA/RNA Molecule: Synthetic oligonucleotide
ucuagaccuguuuugcuuutt

SEQ ID NO: 1264 - DNA, 21 bp, Artificial Sequence
  Description of Artificial Sequence: Synthetic oligonucleotide
  Description of Combined DNA/RNA Molecule: Synthetic oligonucleotide
aaagcaaaacaggucuagatt

SEQ ID NO: 1265 - DNA, 21 bp, Artificial Sequence
  Description of Artificial Sequence: Synthetic oligonucleotide
  Description of Combined DNA/RNA Molecule: Synthetic oligonucleotide
ucuagaccuguuuugcuuutt

SEQ ID NO: 1266 - DNA, 21 bp, Artificial Sequence
  Description of Artificial Sequence: Synthetic oligonucleotide
  Description of Combined DNA/RNA Molecule: Synthetic oligonucleotide
aaagcaaaacaggucuagatt

SEQ ID NO: 1267 - DNA, 21 bp, Artificial Sequence
  Description of Artificial Sequence: Synthetic oligonucleotide
  Description of Combined DNA/RNA Molecule: Synthetic oligonucleotide
ucuagaccuguuuugcuuutt

SEQ ID NO: 1268 - DNA, 21 bp, Artificial Sequence
  Description of Artificial Sequence: Synthetic oligonucleotide
  Description of Combined DNA/RNA Molecule: Synthetic oligonucleotide
aaagcaaaacaggucuagatt

SEQ ID NO: 1269 - DNA, 21 bp, Artificial Sequence
  Description of Artificial Sequence: Synthetic oligonucleotide
  Description of Combined DNA/RNA Molecule: Synthetic oligonucleotide
ucuagaccuguuuugcuuutt

SEQ ID NO: 1270 - DNA, 21 bp, Artificial Sequence
  Description of Artificial Sequence: Synthetic oligonucleotide
  Description of Combined DNA/RNA Molecule: Synthetic oligonucleotide
aaagcaaaacaggucuagatt

SEQ ID NO: 1271 - DNA, 21 bp, Artificial Sequence
  Description of Artificial Sequence: Synthetic oligonucleotide
  Description of Combined DNA/RNA Molecule: Synthetic oligonucleotide
ucuagaccuguuuugcuuutt

SEQ ID NO: 1272 - DNA, 21 bp, Artificial Sequence
  Description of Artificial Sequence: Synthetic oligonucleotide
  Description of Combined DNA/RNA Molecule: Synthetic oligonucleotide
aaagcaaaacaggucuagatt

SEQ ID NO: 1273 - DNA, 21 bp, Artificial Sequence
  Description of Artificial Sequence: Synthetic oligonucleotide
  Description of Combined DNA/RNA Molecule: Synthetic oligonucleotide
ucuagaccuguuuugcuuutt

SEQ ID NO: 1274 - DNA, 21 bp, Artificial Sequence
  Description of Artificial Sequence: Synthetic oligonucleotide
  Description of Combined DNA/RNA Molecule: Synthetic oligonucleotide
aaagcaaaacaggucuagatt

SEQ ID NO: 1275 - DNA, 21 bp, Artificial Sequence
  Description of Artificial Sequence: Synthetic oligonucleotide
  Description of Combined DNA/RNA Molecule: Synthetic oligonucleotide
ucuagaccuguuuugcuuutt

SEQ ID NO: 1276 - DNA, 21 bp, Artificial Sequence
  Description of Artificial Sequence: Synthetic oligonucleotide
  Description of Combined DNA/RNA Molecule: Synthetic oligonucleotide
aaagcaaaacaggucuagatt

SEQ ID NO: 1277 - DNA, 21 bp, Artificial Sequence
  Description of Artificial Sequence: Synthetic oligonucleotide
  Description of Combined DNA/RNA Molecule: Synthetic oligonucleotide
ucauaggccuggaguuuautt

SEQ ID NO: 1278 - DNA, 21 bp, Artificial Sequence
  Description of Artificial Sequence: Synthetic oligonucleotide
  Description of Combined DNA/RNA Molecule: Synthetic oligonucleotide
auaaacuccaggccuaugatt

SEQ ID NO: 1279 - DNA, 21 bp, Artificial Sequence
  Description of Artificial Sequence: Synthetic oligonucleotide
  Description of Combined DNA/RNA Molecule: Synthetic oligonucleotide
ucauaggccuggaguuuautt

SEQ ID NO: 1280 - DNA, 21 bp, Artificial Sequence
  Description of Artificial Sequence: Synthetic oligonucleotide
  Description of Combined DNA/RNA Molecule: Synthetic oligonucleotide
auaaacuccaggccuaugatt

SEQ ID NO: 1281 - DNA, 21 bp, Artificial Sequence
  Description of Artificial Sequence: Synthetic oligonucleotide
  Description of Combined DNA/RNA Molecule: Synthetic oligonucleotide
ucauaggccuggaguuuautt

SEQ ID NO: 1282 - DNA, 21 bp, Artificial Sequence
  Description of Artificial Sequence: Synthetic oligonucleotide
  Description of Combined DNA/RNA Molecule: Synthetic oligonucleotide
auaaacuccaggccuaugatt

SEQ ID NO: 1283 - DNA, 21 bp, Artificial Sequence
  Description of Artificial Sequence: Synthetic oligonucleotide
  Description of Combined DNA/RNA Molecule: Synthetic oligonucleotide
ucauaggccuggaguuuautt

SEQ ID NO: 1284 - DNA, 21 bp, Artificial Sequence
  Description of Artificial Sequence: Synthetic oligonucleotide
  Description of Combined DNA/RNA Molecule: Synthetic oligonucleotide
auaaacuccaggccuaugatt

SEQ ID NO: 1285 - DNA, 21 bp, Artificial Sequence
  Description of Artificial Sequence: Synthetic oligonucleotide
  Description of Combined DNA/RNA Molecule: Synthetic oligonucleotide
ucauaggccuggaguuuautt

SEQ ID NO: 1286 - DNA, 21 bp, Artificial Sequence
  Description of Artificial Sequence: Synthetic oligonucleotide
  Description of Combined DNA/RNA Molecule: Synthetic oligonucleotide
auaaacuccaggccuaugatt

SEQ ID NO: 1287 - DNA, 21 bp, Artificial Sequence
  Description of Artificial Sequence: Synthetic oligonucleotide
  Description of Combined DNA/RNA Molecule: Synthetic oligonucleotide
ucauaggccuggaguuuautt

SEQ ID NO: 1288 - DNA, 21 bp, Artificial Sequence
  Description of Artificial Sequence: Synthetic oligonucleotide
  Description of Combined DNA/RNA Molecule: Synthetic oligonucleotide
auaaacuccaggccuaugatt

SEQ ID NO: 1289 - DNA, 21 bp, Artificial Sequence
  Description of Artificial Sequence: Synthetic oligonucleotide
  Description of Combined DNA/RNA Molecule: Synthetic oligonucleotide
ucauaggccuggaguuuautt

SEQ ID NO: 1290 - DNA, 21 bp, Artificial Sequence
  Description of Artificial Sequence: Synthetic oligonucleotide
  Description of Combined DNA/RNA Molecule: Synthetic oligonucleotide
auaaacuccaggccuaugatt

SEQ ID NO: 1291 - DNA, 21 bp, Artificial Sequence
  Description of Artificial Sequence: Synthetic oligonucleotide
  Description of Combined DNA/RNA Molecule: Synthetic oligonucleotide
ugaagauauuuauucugggtt

SEQ ID NO: 1292 - DNA, 21 bp, Artificial Sequence
  Description of Artificial Sequence: Synthetic oligonucleotide
  Description of Combined DNA/RNA Molecule: Synthetic oligonucleotide
cccagaauaaauaucuucatt

SEQ ID NO: 1293 - DNA, 21 bp, Artificial Sequence
  Description of Artificial Sequence: Synthetic oligonucleotide
  Description of Combined DNA/RNA Molecule: Synthetic oligonucleotide
ugaagauauuuauucugggtt

SEQ ID NO: 1294 - DNA, 21 bp, Artificial Sequence
  Description of Artificial Sequence: Synthetic oligonucleotide
  Description of Combined DNA/RNA Molecule: Synthetic oligonucleotide
cccagaauaaauaucuucatt

SEQ ID NO: 1295 - DNA, 21 bp, Artificial Sequence
  Description of Artificial Sequence: Synthetic oligonucleotide
  Description of Combined DNA/RNA Molecule: Synthetic oligonucleotide
ucuggguuuuguagcauuutt

SEQ ID NO: 1296 - DNA, 21 bp, Artificial Sequence
  Description of Artificial Sequence: Synthetic oligonucleotide
  Description of Combined DNA/RNA Molecule: Synthetic oligonucleotide
aaaugcuacaaaacccagatt

SEQ ID NO: 1297 - DNA, 21 bp, Artificial Sequence
  Description of Artificial Sequence: Synthetic oligonucleotide
  Description of Combined DNA/RNA Molecule: Synthetic oligonucleotide
ucuggguuuuguagcauuutt

SEQ ID NO: 1298 - DNA, 21 bp, Artificial Sequence
  Description of Artificial Sequence: Synthetic oligonucleotide
  Description of Combined DNA/RNA Molecule: Synthetic oligonucleotide
aaaugcuacaaaacccagatt

SEQ ID NO: 1299 - DNA, 21 bp, Artificial Sequence
  Description of Artificial Sequence: Synthetic oligonucleotide
  Description of Combined DNA/RNA Molecule: Synthetic oligonucleotide
auaaaaacaaacaaacguutt

SEQ ID NO: 1300 - DNA, 21 bp, Artificial Sequence
  Description of Artificial Sequence: Synthetic oligonucleotide
  Description of Combined DNA/RNA Molecule: Synthetic oligonucleotide
aacguuuguuuguuuuuautt

SEQ ID NO: 1301 - DNA, 21 bp, Artificial Sequence
  Description of Artificial Sequence: Synthetic oligonucleotide
  Description of Combined DNA/RNA Molecule: Synthetic oligonucleotide
aaacaaacaaacguugucctt

SEQ ID NO: 1302 - DNA, 21 bp, Artificial Sequence
  Description of Artificial Sequence: Synthetic oligonucleotide
  Description of Combined DNA/RNA Molecule: Synthetic oligonucleotide
ggacaacguuuguuuguuutt

SEQ ID NO: 1303 - DNA, 21 bp, Artificial Sequence
  Description of Artificial Sequence: Synthetic oligonucleotide
  Description of Combined DNA/RNA Molecule: Synthetic oligonucleotide
aacaaacaaacguuguccutt

SEQ ID NO: 1304 - DNA, 21 bp, Artificial Sequence
  Description of Artificial Sequence: Synthetic oligonucleotide
  Description of Combined DNA/RNA Molecule: Synthetic oligonucleotide
aggacaacguuuguuuguutt

SEQ ID NO: 1305 - DNA, 21 bp, Artificial Sequence
  Description of Artificial Sequence: Synthetic oligonucleotide
  Description of Combined DNA/RNA Molecule: Synthetic oligonucleotide
gccuggaguuuauucggaatt

SEQ ID NO: 1306 - DNA, 21 bp, Artificial Sequence
  Description of Artificial Sequence: Synthetic oligonucleotide
  Description of Combined DNA/RNA Molecule: Synthetic oligonucleotide
uuccgaauaaacuccaggctt

SEQ ID NO: 1307 - DNA, 21 bp, Artificial Sequence
  Description of Artificial Sequence: Synthetic oligonucleotide
  Description of Combined DNA/RNA Molecule: Synthetic oligonucleotide
gccuggaguuuauucggaatt

SEQ ID NO: 1308 - DNA, 21 bp, Artificial Sequence
  Description of Artificial Sequence: Synthetic oligonucleotide
  Description of Combined DNA/RNA Molecule: Synthetic oligonucleotide
uuccgaauaaacuccaggctt

SEQ ID NO: 1309 - DNA, 21 bp, Artificial Sequence
  Description of Artificial Sequence: Synthetic oligonucleotide
  Description of Combined DNA/RNA Molecule: Synthetic oligonucleotide
gccuggaguuuauucggaatt

SEQ ID NO: 1310 - DNA, 21 bp, Artificial Sequence
  Description of Artificial Sequence: Synthetic oligonucleotide
  Description of Combined DNA/RNA Molecule: Synthetic oligonucleotide
uuccgaauaaacuccaggctt

SEQ ID NO: 1311 - DNA, 21 bp, Artificial Sequence
  Description of Artificial Sequence: Synthetic oligonucleotide
  Description of Combined DNA/RNA Molecule: Synthetic oligonucleotide
gccuggaguuuauucggaatt

SEQ ID NO: 1312 - DNA, 21 bp, Artificial Sequence
  Description of Artificial Sequence: Synthetic oligonucleotide
  Description of Combined DNA/RNA Molecule: Synthetic oligonucleotide
uuccgaauaaacuccaggctt

SEQ ID NO: 1313 - DNA, 21 bp, Artificial Sequence
  Description of Artificial Sequence: Synthetic oligonucleotide
  Description of Combined DNA/RNA Molecule: Synthetic oligonucleotide
gccuggaguuuauucggaatt

SEQ ID NO: 1314 - DNA, 21 bp, Artificial Sequence
  Description of Artificial Sequence: Synthetic oligonucleotide
  Description of Combined DNA/RNA Molecule: Synthetic oligonucleotide
uuccgaauaaacuccaggctt

SEQ ID NO: 1315 - DNA, 21 bp, Artificial Sequence
  Description of Artificial Sequence: Synthetic oligonucleotide
  Description of Combined DNA/RNA Molecule: Synthetic oligonucleotide
gccuggaguuuauucggaatt

SEQ ID NO: 1316 - DNA, 21 bp, Artificial Sequence
  Description of Artificial Sequence: Synthetic oligonucleotide
  Description of Combined DNA/RNA Molecule: Synthetic oligonucleotide
uuccgaauaaacuccaggctt

SEQ ID NO: 1317 - DNA, 21 bp, Artificial Sequence
  Description of Artificial Sequence: Synthetic oligonucleotide
  Description of Combined DNA/RNA Molecule: Synthetic oligonucleotide
gccuggaguuuauucggaatt

SEQ ID NO: 1318 - DNA, 21 bp, Artificial Sequence
  Description of Artificial Sequence: Synthetic oligonucleotide
  Description of Combined DNA/RNA Molecule: Synthetic oligonucleotide
uuccgaauaaacuccaggctt

SEQ ID NO: 1319 - DNA, 21 bp, Artificial Sequence
  Description of Artificial Sequence: Synthetic oligonucleotide
  Description of Combined DNA/RNA Molecule: Synthetic oligonucleotide
gccuggaguuuauucggaatt

SEQ ID NO: 1320 - DNA, 21 bp, Artificial Sequence
  Description of Artificial Sequence: Synthetic oligonucleotide
  Description of Combined DNA/RNA Molecule: Synthetic oligonucleotide
uuccgaauaaacuccaggctt

SEQ ID NO: 1321 - DNA, 21 bp, Artificial Sequence
  Description of Artificial Sequence: Synthetic oligonucleotide
  Description of Combined DNA/RNA Molecule: Synthetic oligonucleotide
gccuggaguuuauucggaatt

SEQ ID NO: 1322 - DNA, 21 bp, Artificial Sequence
  Description of Artificial Sequence: Synthetic oligonucleotide
  Description of Combined DNA/RNA Molecule: Synthetic oligonucleotide
uuccgaauaaacuccaggctt

SEQ ID NO: 1323 - DNA, 21 bp, Artificial Sequence
  Description of Artificial Sequence: Synthetic oligonucleotide
  Description of Combined DNA/RNA Molecule: Synthetic oligonucleotide
gccuggaguuuauucggaatt

SEQ ID NO: 1324 - DNA, 21 bp, Artificial Sequence
  Description of Artificial Sequence: Synthetic oligonucleotide
  Description of Combined DNA/RNA Molecule: Synthetic oligonucleotide
uuccgaauaaacuccaggctt

SEQ ID NO: 1325 - DNA, 21 bp, Artificial Sequence
  Description of Artificial Sequence: Synthetic oligonucleotide
  Description of Combined DNA/RNA Molecule: Synthetic oligonucleotide
gccuggaguuuauucggaatt

SEQ ID NO: 1326 - DNA, 21 bp, Artificial Sequence
  Description of Artificial Sequence: Synthetic oligonucleotide
  Description of Combined DNA/RNA Molecule: Synthetic oligonucleotide
uuccgaauaaacuccaggctt

SEQ ID NO: 1327 - RNA, 19 nt, Artificial Sequence
  Description of Artificial Sequence: Synthetic oligonucleotide
gccuggaguuuauucggaa

SEQ ID NO: 1328 - RNA, 21 nt, Artificial Sequence
  Description of Artificial Sequence: Synthetic oligonucleotide
uuccgaauaaacuccaggccu

SEQ ID NO: 1329 - RNA, 20 nt, Artificial Sequence
  Description of Artificial Sequence: Synthetic oligonucleotide
gccuggaguuuauucggaaa

SEQ ID NO: 1330 - RNA, 22 nt, Artificial Sequence
  Description of Artificial Sequence: Synthetic oligonucleotide
uuuccgaauaaacuccaggccu

SEQ ID NO: 1331 - RNA, 21 nt, Artificial Sequence
  Description of Artificial Sequence: Synthetic oligonucleotide
gccuggaguuuauucggaaaa

SEQ ID NO: 1332 - RNA, 23 nt, Artificial Sequence
  Description of Artificial Sequence: Synthetic oligonucleotide
uuuuccgaauaaacuccaggccu

SEQ ID NO: 1333 - RNA, 22 nt, Artificial Sequence
  Description of Artificial Sequence: Synthetic oligonucleotide
gccuggaguuuauucggaaaag

SEQ ID NO: 1334 - RNA, 24 nt, Artificial Sequence
  Description of Artificial Sequence: Synthetic oligonucleotide
cuuuuccgaauaaacuccaggccu

SEQ ID NO: 1335 - DNA, 22 bp, Artificial Sequence
  Description of Artificial Sequence: Synthetic oligonucleotide
  Description of Combined DNA/RNA Molecule: Synthetic oligonucleotide
  modified_base (22)..(22): Abasic nucleotide
gccuggaguuuauucggaattn

SEQ ID NO: 1336 - DNA, 22 bp, Artificial Sequence
  Description of Artificial Sequence: Synthetic oligonucleotide
  Description of Combined DNA/RNA Molecule: Synthetic oligonucleotide
  modified_base (22)..(22): Abasic nucleotide
uuccgaauaaacuccaggcttn

SEQ ID NO: 1337 - DNA, 23 bp, Artificial Sequence
  Description of Artificial Sequence: Synthetic oligonucleotide
  Description of Combined DNA/RNA Molecule: Synthetic oligonucleotide
  modified_base (23)..(23): Abasic nucleotide
gccuggaguuuauucggaaattn

SEQ ID NO: 1338 - DNA, 23 bp, Artificial Sequence
  Description of Artificial Sequence: Synthetic oligonucleotide
  Description of Combined DNA/RNA Molecule: Synthetic oligonucleotide
  modified_base (23)..(23): Abasic nucleotide
uuuccgaauaaacuccaggcttn

SEQ ID NO: 1339 - DNA, 24 bp, Artificial Sequence
  Description of Artificial Sequence: Synthetic oligonucleotide
  Description of Combined DNA/RNA Molecule: Synthetic oligonucleotide
  modified_base (24)..(24): Abasic nucleotide
gccuggaguuuauucggaaaattn

SEQ ID NO: 1340 - DNA, 24 bp, Artificial Sequence
  Description of Artificial Sequence: Synthetic oligonucleotide
  Description of Combined DNA/RNA Molecule: Synthetic oligonucleotide
  modified_base (24)..(24): Abasic nucleotide
uuuuccgaauaaacuccaggcttn

SEQ ID NO: 1341 - DNA, 25 bp, Artificial Sequence
  Description of Artificial Sequence: Synthetic oligonucleotide
  Description of Combined DNA/RNA Molecule: Synthetic oligonucleotide
  modified_base (25)..(25): Abasic nucleotide
gccuggaguuuauucggaaaagttn

SEQ ID NO: 1342 - DNA, 25 bp, Artificial Sequence
  Description of Artificial Sequence: Synthetic oligonucleotide
  Description of Combined DNA/RNA Molecule: Synthetic oligonucleotide
  modified_base (25)..(25): Abasic nucleotide
cuuuuccgaauaaacuccaggcttn

SEQ ID NO: 1343 - DNA, 21 bp, Artificial Sequence
  Description of Artificial Sequence: Synthetic oligonucleotide
  Description of Combined DNA/RNA Molecule: Synthetic oligonucleotide
gccuggaguuuauucggaatt

SEQ ID NO: 1344 - RNA, 21 nt, Artificial Sequence
  Description of Artificial Sequence: Synthetic oligonucleotide
uuccgaauaaacuccaggccu

SEQ ID NO: 1345 - DNA, 21 bp, Artificial Sequence
  Description of Artificial Sequence: Synthetic oligonucleotide
  Description of Combined DNA/RNA Molecule: Synthetic oligonucleotide
gccuggaguuuauucggaatt

SEQ ID NO: 1346 - RNA, 21 nt, Artificial Sequence
  Description of Artificial Sequence: Synthetic oligonucleotide
uuccgaauaaacuccaggccu

SEQ ID NO: 1347 - RNA, 19 nt, Artificial Sequence
  Description of Artificial Sequence: Synthetic oligonucleotide
gccuggaguuuauucggaa

SEQ ID NO: 1348 - DNA, 22 bp, Artificial Sequence
  Description of Artificial Sequence: Synthetic oligonucleotide
  Description of Combined DNA/RNA Molecule: Synthetic oligonucleotide
  modified_base (22)..(22): Abasic nucleotide
uuccgaauaaacuccaggcttn

SEQ ID NO: 1349 - RNA, 19 nt, Artificial Sequence
  Description of Artificial Sequence: Synthetic oligonucleotide
gccuggaguuuauucggaa

SEQ ID NO: 1350 - DNA, 21 bp, Artificial Sequence
  Description of Artificial Sequence: Synthetic oligonucleotide
  Description of Combined DNA/RNA Molecule: Synthetic oligonucleotide
uuccgaauaaacuccaggctt

SEQ ID NO: 1351 - RNA, 19 nt, Artificial Sequence
  Description of Artificial Sequence: Synthetic oligonucleotide
gccuggaguuuauucggaa

SEQ ID NO: 1352 - DNA, 21 bp, Artificial Sequence
  Description of Artificial Sequence: Synthetic oligonucleotide
  Description of Combined DNA/RNA Molecule: Synthetic oligonucleotide
uuccgaauaaacuccaggctt

SEQ ID NO: 1353 - RNA, 19 nt, Artificial Sequence
  Description of Artificial Sequence: Synthetic oligonucleotide
gccuggaguuuauucggaa

SEQ ID NO: 1354 - DNA, 21 bp, Artificial Sequence
  Description of Artificial Sequence: Synthetic oligonucleotide
  Description of Combined DNA/RNA Molecule: Synthetic oligonucleotide
uuccgaauaaacuccaggctt

SEQ ID NO: 1355 - RNA, 19 nt, Artificial Sequence
  Description of Artificial Sequence: Synthetic oligonucleotide
gccuggaguuuauucggaa

SEQ ID NO: 1356 - RNA, 19 nt, Artificial Sequence
  Description of Artificial Sequence: Synthetic oligonucleotide
uuccgaauaaacuccaggc

SEQ ID NO: 1357 - DNA, 22 bp, Artificial Sequence
  Description of Artificial Sequence: Synthetic oligonucleotide
  Description of Combined DNA/RNA Molecule: Synthetic oligonucleotide
  modified_base (7)..(7): a, c, t, g, unknown or other
gccuggnaguuuauucggaatt

SEQ ID NO: 1358 - DNA, 21 bp, Artificial Sequence
  Description of Artificial Sequence: Synthetic oligonucleotide
  Description of Combined DNA/RNA Molecule: Synthetic oligonucleotide
uuccgaauaaacuccaggctt

SEQ ID NO: 1359 - DNA, 22 bp, Artificial Sequence
  Description of Artificial Sequence: Synthetic oligonucleotide
  Description of Combined DNA/RNA Molecule: Synthetic oligonucleotide
  modified_base (22)..(22): Abasic nucleotide
gccuggaguuuauucggaattn

SEQ ID NO: 1360 - DNA, 22 bp, Artificial Sequence
  Description of Artificial Sequence: Synthetic oligonucleotide
  Description of Combined DNA/RNA Molecule: Synthetic oligonucleotide
  modified_base (22)..(22): Abasic nucleotide
uuccgaauaaacuccaggcttn

SEQ ID NO: 1361 - RNA, 19 nt, Artificial Sequence
  Description of Artificial Sequence: Synthetic oligonucleotide
gccuggaguuuauucggaa

SEQ ID NO: 1362 - RNA, 21 nt, Artificial Sequence
  Description of Artificial Sequence: Synthetic oligonucleotide
uuccgaauaaacuccaggccu

SEQ ID NO: 1363 - DNA, 22 bp, Artificial Sequence
  Description of Artificial Sequence: Synthetic oligonucleotide
  Description of Combined DNA/RNA Molecule: Synthetic oligonucleotide
  modified_base (7)..(7): a, c, t, g, unknown or other
gccuggnaguuuauucggaatt

SEQ ID NO: 1364 - DNA, 21 bp, Artificial Sequence
  Description of Artificial Sequence: Synthetic oligonucleotide
  Description of Combined DNA/RNA Molecule: Synthetic oligonucleotide
uuccgaauaaacuccaggctt

SEQ ID NO: 1365 - DNA, 22 bp, Artificial Sequence
  Description of Artificial Sequence: Synthetic oligonucleotide
  Description of Combined DNA/RNA Molecule: Synthetic oligonucleotide
  modified_base (22)..(22): Abasic nucleotide
gccuggaguuuauucggaattn

SEQ ID NO: 1366 - DNA, 22 bp, Artificial Sequence
  Description of Artificial Sequence: Synthetic oligonucleotide
  Description of Combined DNA/RNA Molecule: Synthetic oligonucleotide
  modified_base (22)..(22): Abasic nucleotide
uuccgaauaaacuccaggcttn

SEQ ID NO: 1367 - RNA, 19 nt, Artificial Sequence
  Description of Artificial Sequence: Synthetic oligonucleotide
gccuggaguuuauucggaa

SEQ ID NO: 1368 - RNA, 21 nt, Artificial Sequence
  Description of Artificial Sequence: Synthetic oligonucleotide
uuccgaauaaacuccaggccu

SEQ ID NO: 1369 - DNA, 22 bp, Artificial Sequence
  Description of Artificial Sequence: Synthetic oligonucleotide
  Description of Combined DNA/RNA Molecule: Synthetic oligonucleotide
  modified_base (7)..(7): a, c, t, g, unknown or other
gccuggnaguuuauucggaatt

SEQ ID NO: 1370 - DNA, 21 bp, Artificial Sequence
  Description of Artificial Sequence: Synthetic oligonucleotide
  Description of Combined DNA/RNA Molecule: Synthetic oligonucleotide
uuccgaauaaacuccaggctt

SEQ ID NO: 1371 - DNA, 22 bp, Artificial Sequence
  Description of Artificial Sequence: Synthetic oligonucleotide
  Description of Combined DNA/RNA Molecule: Synthetic oligonucleotide
  modified_base (22)..(22): Abasic nucleotide
gccuggaguuuauucggaattn

SEQ ID NO: 1372 - DNA, 22 bp, Artificial Sequence
  Description of Artificial Sequence: Synthetic oligonucleotide
  Description of Combined DNA/RNA Molecule: Synthetic oligonucleotide
  modified_base (22)..(22): Abasic nucleotide
uuccgaauaaacuccaggcttn

SEQ ID NO: 1373 - RNA, 19 nt, Artificial Sequence
  Description of Artificial Sequence: Synthetic oligonucleotide
gccuggaguuuauucggaa

SEQ ID NO: 1374 - RNA, 21 nt, Artificial Sequence
  Description of Artificial Sequence: Synthetic oligonucleotide
uuccgaauaaacuccaggccu

SEQ ID NO: 1375 - RNA, 19 nt, Artificial Sequence
  Description of Artificial Sequence: Synthetic oligonucleotide
gccuggaguuuauucggaa

SEQ ID NO: 1376 - RNA, 19 nt, Artificial Sequence
  Description of Artificial Sequence: Synthetic oligonucleotide
uuccgaauaaacuccaggc

SEQ ID NO: 1377 - RNA, 19 nt, Artificial Sequence
  Description of Artificial Sequence: Synthetic oligonucleotide
gccuggaguuuauucggaa

SEQ ID NO: 1378 - RNA, 19 nt, Artificial Sequence
  Description of Artificial Sequence: Synthetic oligonucleotide
uuccgaauaaacuccaggc

SEQ ID NO: 1379 - RNA, 19 nt, Artificial Sequence
  Description of Artificial Sequence: Synthetic oligonucleotide
gccuggaguuuauucggaa

SEQ ID NO: 1380 - RNA, 19 nt, Artificial Sequence
  Description of Artificial Sequence: Synthetic oligonucleotide
uuccgaauaaacuccaggc

SEQ ID NO: 1381 - DNA, 21 bp, Artificial Sequence
  Description of Artificial Sequence: Synthetic oligonucleotide
  Description of Combined DNA/RNA Molecule: Synthetic oligonucleotide
gccuggaguuuauucggaatt

SEQ ID NO: 1382 - DNA, 21 bp, Artificial Sequence
  Description of Artificial Sequence: Synthetic oligonucleotide
  Description of Combined DNA/RNA Molecule: Synthetic oligonucleotide
uuccgaauaaacuccaggctt

SEQ ID NO: 1383 - DNA, 21 bp, Artificial Sequence
  Description of Artificial Sequence: Synthetic oligonucleotide
  Description of Combined DNA/RNA Molecule: Synthetic oligonucleotide
gccuggaguuuauucggaatt

SEQ ID NO: 1384 - DNA, 21 bp, Artificial Sequence
  Description of Artificial Sequence: Synthetic oligonucleotide
  Description of Combined DNA/RNA Molecule: Synthetic oligonucleotide
uuccgaauaaacuccaggctt

SEQ ID NO: 1385 - DNA, 21 bp, Artificial Sequence
  Description of Artificial Sequence: Synthetic oligonucleotide
  Description of Combined DNA/RNA Molecule: Synthetic oligonucleotide
gccuggaguuuauucggaatt

SEQ ID NO: 1386 - DNA, 21 bp, Artificial Sequence
  Description of Artificial Sequence: Synthetic oligonucleotide
  Description of Combined DNA/RNA Molecule: Synthetic oligonucleotide
uuccgaauaaacuccaggctt

SEQ ID NO: 1387 - DNA, 21 bp, Artificial Sequence
  Description of Artificial Sequence: Synthetic oligonucleotide
  Description of Combined DNA/RNA Molecule: Synthetic oligonucleotide
gccuggaguuuauucggaatt

SEQ ID NO: 1388 - DNA, 21 bp, Artificial Sequence
  Description of Artificial Sequence: Synthetic oligonucleotide
  Description of Combined DNA/RNA Molecule: Synthetic oligonucleotide
uuccgaauaaacuccaggctt

SEQ ID NO: 1389 - DNA, 21 bp, Artificial Sequence
  Description of Artificial Sequence: Synthetic oligonucleotide
  Description of Combined DNA/RNA Molecule: Synthetic oligonucleotide
gccuggaguuuauucggaatt

SEQ ID NO: 1390 - RNA, 21 nt, Artificial Sequence
  Description of Artificial Sequence: Synthetic oligonucleotide
uuccgaauaaacuccaggccu

SEQ ID NO: 1391 - DNA, 21 bp, Artificial Sequence
  Description of Artificial Sequence: Synthetic oligonucleotide
  Description of Combined DNA/RNA Molecule: Synthetic oligonucleotide
gccuggaguuuauucggaatt

SEQ ID NO: 1392 - RNA, 21 nt, Artificial Sequence
  Description of Artificial Sequence: Synthetic oligonucleotide
uuccgaauaaacuccaggccu

SEQ ID NO: 1393 - DNA, 21 bp, Artificial Sequence
  Description of Artificial Sequence: Synthetic oligonucleotide
  Description of Combined DNA/RNA Molecule: Synthetic oligonucleotide
gccuggaguuuauucggaatt

SEQ ID NO: 1394 - DNA, 21 bp, Artificial Sequence
  Description of Artificial Sequence: Synthetic oligonucleotide
  Description of Combined DNA/RNA Molecule: Synthetic oligonucleotide
uuccgaauaaacuccaggctt

SEQ ID NO: 1395 - DNA, 21 bp, Artificial Sequence
  Description of Artificial Sequence: Synthetic oligonucleotide
  Description of Combined DNA/RNA Molecule: Synthetic oligonucleotide
gccuggaguuuauucggaatt

SEQ ID NO: 1396 - DNA, 21 bp, Artificial Sequence
  Description of Artificial Sequence: Synthetic oligonucleotide
  Description of Combined DNA/RNA Molecule: Synthetic oligonucleotide
uuccgaauaaacuccaggctt

SEQ ID NO: 1397 - DNA, 22 bp, Artificial Sequence
  Description of Artificial Sequence: Synthetic oligonucleotide
  Description of Combined DNA/RNA Molecule: Synthetic oligonucleotide
  modified_base (7)..(7): a, c, t, g, unknown or other
gccuggnaguuuauucggaatt

SEQ ID NO: 1398 - DNA, 21 bp, Artificial Sequence
  Description of Artificial Sequence: Synthetic oligonucleotide
  Description of Combined DNA/RNA Molecule: Synthetic oligonucleotide
uuccgaauaaacuccaggctt

SEQ ID NO: 1399 - DNA, 22 bp, Artificial Sequence
  Description of Artificial Sequence: Synthetic oligonucleotide
  Description of Combined DNA/RNA Molecule: Synthetic oligonucleotide
  modified_base (22)..(22): Abasic nucleotide
gccuggaguuuauucggaattn

SEQ ID NO: 1400 - DNA, 22 bp, Artificial Sequence
  Description of Artificial Sequence: Synthetic oligonucleotide
  Description of Combined DNA/RNA Molecule: Synthetic oligonucleotide
  modified_base (22)..(22): Abasic nucleotide
uuccgaauaaacuccaggcttn

SEQ ID NO: 1401 - RNA, 19 nt, Artificial Sequence
  Description of Artificial Sequence: Synthetic oligonucleotide
gccuggaguuuauucggaa

SEQ ID NO: 1402 - RNA, 21 nt, Artificial Sequence
  Description of Artificial Sequence: Synthetic oligonucleotide
uuccgaauaaacuccaggccu

SEQ ID NO: 1403 - RNA, 19 nt, Artificial Sequence
  Description of Artificial Sequence: Synthetic oligonucleotide
gccuggaguuuauucggaa

SEQ ID NO: 1404 - RNA, 21 nt, Artificial Sequence
  Description of Artificial Sequence: Synthetic oligonucleotide
uuccgaauaaacuccaggccu

SEQ ID NO: 1405 - RNA, 19 nt, Artificial Sequence
  Description of Artificial Sequence: Synthetic oligonucleotide
gccuggaguuuauucggaa

SEQ ID NO: 1406 - RNA, 21 nt, Artificial Sequence
  Description of Artificial Sequence: Synthetic oligonucleotide
uuccgaauaaacuccaggccu

SEQ ID NO: 1407 - RNA, 19 nt, Artificial Sequence
  Description of Artificial Sequence: Synthetic oligonucleotide
gccuggaguuuauucggaa

SEQ ID NO: 1408 - DNA, 21 bp, Artificial Sequence
  Description of Artificial Sequence: Synthetic oligonucleotide
  Description of Combined DNA/RNA Molecule: Synthetic oligonucleotide
uuccgaauaaacuccaggctt

SEQ ID NO: 1409 - RNA, 19 nt, Artificial Sequence
  Description of Artificial Sequence: Synthetic oligonucleotide
gccuggaguuuauucggaa

SEQ ID NO: 1410 - DNA, 21 bp, Artificial Sequence
  Description of Artificial Sequence: Synthetic oligonucleotide
  Description of Combined DNA/RNA Molecule: Synthetic oligonucleotide
uuccgaauaaacuccaggctt

SEQ ID NO: 1411 - RNA, 19 nt, Artificial Sequence
  Description of Artificial Sequence: Synthetic oligonucleotide
gccuggaguuuauucggaa

SEQ ID NO: 1412 - RNA, 19 nt, Artificial Sequence
  Description of Artificial Sequence: Synthetic oligonucleotide
uuccgaauaaacuccaggc

SEQ ID NO: 1413 - RNA, 19 nt, Artificial Sequence
  Description of Artificial Sequence: Synthetic oligonucleotide
gccuggaguuuauucggaa

SEQ ID NO: 1414 - RNA, 19 nt, Artificial Sequence
  Description of Artificial Sequence: Synthetic oligonucleotide
uuccgaauaaacuccaggc

SEQ ID NO: 1415 - RNA, 19 nt, Artificial Sequence
  Description of Artificial Sequence: Synthetic oligonucleotide
gccuggaguuuauucggaa

SEQ ID NO: 1416 - RNA, 21 nt, Artificial Sequence
  Description of Artificial Sequence: Synthetic oligonucleotide
uuccgaauaaacuccaggccu

SEQ ID NO: 1417 - RNA, 19 nt, Artificial Sequence
  Description of Artificial Sequence: Synthetic oligonucleotide
gccuggaguuuauucggaa

SEQ ID NO: 1418 - RNA, 21 nt, Artificial Sequence
  Description of Artificial Sequence: Synthetic oligonucleotide
uuccgaauaaacuccaggccu

SEQ ID NO: 1419 - RNA, 19 nt, Artificial Sequence
  Description of Artificial Sequence: Synthetic oligonucleotide
gccuggaguuuauucggaa

SEQ ID NO: 1420 - DNA, 21 bp, Artificial Sequence
  Description of Artificial Sequence: Synthetic oligonucleotide
  Description of Combined DNA/RNA Molecule: Synthetic oligonucleotide
uuccgaauaaacuccaggctt

SEQ ID NO: 1421 - RNA, 19 nt, Artificial Sequence
  Description of Artificial Sequence: Synthetic oligonucleotide
gccuggaguuuauucggaa

SEQ ID NO: 1422 - DNA, 21 bp, Artificial Sequence
  Description of Artificial Sequence: Synthetic oligonucleotide
  Description of Combined DNA/RNA Molecule: Synthetic oligonucleotide
uuccgaauaaacuccaggctt

SEQ ID NO: 1423 - RNA, 19 nt, Artificial Sequence
  Description of Artificial Sequence: Synthetic oligonucleotide
gccuggaguuuauucggaa

SEQ ID NO: 1424 - RNA, 21 nt, Artificial Sequence
  Description of Artificial Sequence: Synthetic oligonucleotide
uuccgaauaaacuccaggccu

SEQ ID NO: 1425 - DNA, 21 bp, Artificial Sequence
  Description of Artificial Sequence: Synthetic oligonucleotide
  Description of Combined DNA/RNA Molecule: Synthetic oligonucleotide
gccuggaguuuauucggaatt

SEQ ID NO: 1426 - DNA, 21 bp, Artificial Sequence
  Description of Artificial Sequence: Synthetic oligonucleotide
  Description of Combined DNA/RNA Molecule: Synthetic oligonucleotide
uuccgaauaaacuccaggctt

SEQ ID NO: 1427 - DNA, 21 bp, Artificial Sequence
  Description of Artificial Sequence: Synthetic oligonucleotide
  Description of Combined DNA/RNA Molecule: Synthetic oligonucleotide
gccuggaguuuauucggaatt

SEQ ID NO: 1428 - DNA, 21 bp, Artificial Sequence
  Description of Artificial Sequence: Synthetic oligonucleotide
  Description of Combined DNA/RNA Molecule: Synthetic oligonucleotide
uuccgaauaaacuccaggctt

SEQ ID NO: 1429 - DNA, 21 bp, Artificial Sequence
  Description of Artificial Sequence: Synthetic oligonucleotide
  Description of Combined DNA/RNA Molecule: Synthetic oligonucleotide
gccuggaguuuauucggaatt

SEQ ID NO: 1430 - DNA, 21 bp, Artificial Sequence
  Description of Artificial Sequence: Synthetic oligonucleotide
  Description of Combined DNA/RNA Molecule: Synthetic oligonucleotide
uuccgaauaaacuccaggctt

SEQ ID NO: 1431 - DNA, 21 bp, Artificial Sequence
  Description of Artificial Sequence: Synthetic oligonucleotide
  Description of Combined DNA/RNA Molecule: Synthetic oligonucleotide
gccuggaguuuauucggaatt

SEQ ID NO: 1432 - DNA, 21 bp, Artificial Sequence
  Description of Artificial Sequence: Synthetic oligonucleotide
  Description of Combined DNA/RNA Molecule: Synthetic oligonucleotide
uuccgaauaaacuccaggctt

SEQ ID NO: 1433 - DNA, 21 bp, Artificial Sequence
  Description of Artificial Sequence: Synthetic oligonucleotide
  Description of Combined DNA/RNA Molecule: Synthetic oligonucleotide
gccuggaguuuauucggaatt

SEQ ID NO: 1434 - DNA, 21 bp, Artificial Sequence
  Description of Artificial Sequence: Synthetic oligonucleotide
  Description of Combined DNA/RNA Molecule: Synthetic oligonucleotide
uuccgaauaaacuccaggctt

SEQ ID NO: 1435 - DNA, 21 bp, Artificial Sequence
  Description of Artificial Sequence: Synthetic oligonucleotide
  Description of Combined DNA/RNA Molecule: Synthetic oligonucleotide
gccuggaguuuauucggaatt

SEQ ID NO: 1436 - DNA, 21 bp, Artificial Sequence
  Description of Artificial Sequence: Synthetic oligonucleotide
  Description of Combined DNA/RNA Molecule: Synthetic oligonucleotide
uuccgaauaaacuccaggctt

SEQ ID NO: 1437 - DNA, 21 bp, Artificial Sequence
  Description of Artificial Sequence: Synthetic oligonucleotide
  Description of Combined DNA/RNA Molecule: Synthetic oligonucleotide
gccuggaguuuauucggaatt

SEQ ID NO: 1438 - DNA, 21 bp, Artificial Sequence
  Description of Artificial Sequence: Synthetic oligonucleotide
  Description of Combined DNA/RNA Molecule: Synthetic oligonucleotide
uuccgaauaaacuccaggctt

SEQ ID NO: 1439 - DNA, 21 bp, Artificial Sequence
  Description of Artificial Sequence: Synthetic oligonucleotide
  Description of Combined DNA/RNA Molecule: Synthetic oligonucleotide
gccuggaguuuauucggaatt

SEQ ID NO: 1440 - RNA, 21 nt, Artificial Sequence
  Description of Artificial Sequence: Synthetic oligonucleotide
uuccgaauaaacuccaggccu

SEQ ID NO: 1441 - DNA, 21 bp, Artificial Sequence
  Description of Artificial Sequence: Synthetic oligonucleotide
  Description of Combined DNA/RNA Molecule: Synthetic oligonucleotide
gccuggaguuuauucggaatt

SEQ ID NO: 1442 - RNA, 21 nt, Artificial Sequence
  Description of Artificial Sequence: Synthetic oligonucleotide
uuccgaauaaacuccaggccu

SEQ ID NO: 1443 - DNA, 21 bp, Artificial Sequence
  Description of Artificial Sequence: Synthetic oligonucleotide
  Description of Combined DNA/RNA Molecule: Synthetic oligonucleotide
gccuggaguuuauucggaatt

SEQ ID NO: 1444 - DNA, 21 bp, Artificial Sequence
  Description of Artificial Sequence: Synthetic oligonucleotide
  Description of Combined DNA/RNA Molecule: Synthetic oligonucleotide
uuccgaauaaacuccaggctt

SEQ ID NO: 1445 - DNA, 21 bp, Artificial Sequence
  Description of Artificial Sequence: Synthetic oligonucleotide
  Description of Combined DNA/RNA Molecule: Synthetic oligonucleotide
gccuggaguuuauucggaatt

SEQ ID NO: 1446 - DNA, 21 bp, Artificial Sequence
  Description of Artificial Sequence: Synthetic oligonucleotide
  Description of Combined DNA/RNA Molecule: Synthetic oligonucleotide
uuccgaauaaacuccaggctt

SEQ ID NO: 1447 - DNA, 21 bp, Artificial Sequence
  Description of Artificial Sequence: Synthetic oligonucleotide
  Description of Combined DNA/RNA Molecule: Synthetic oligonucleotide
gccuggaguuuauucggaatt

SEQ ID NO: 1448 - DNA, 21 bp, Artificial Sequence
  Description of Artificial Sequence: Synthetic oligonucleotide
  Description of Combined DNA/RNA Molecule: Synthetic oligonucleotide
uuccgaauaaacuccaggctt

SEQ ID NO: 1449 - DNA, 21 bp, Artificial Sequence
  Description of Artificial Sequence: Synthetic oligonucleotide
  Description of Combined DNA/RNA Molecule: Synthetic oligonucleotide
gccuggaguuuauucggaatt

SEQ ID NO: 1450 - DNA, 21 bp, Artificial Sequence
  Description of Artificial Sequence: Synthetic oligonucleotide
  Description of Combined DNA/RNA Molecule: Synthetic oligonucleotide
uuccgaauaaacuccaggctt

SEQ ID NO: 1451 - DNA, 21 bp, Artificial Sequence
  Description of Artificial Sequence: Synthetic oligonucleotide
  Description of Combined DNA/RNA Molecule: Synthetic oligonucleotide
gccuggaguuuauucggaatt

SEQ ID NO: 1452 - RNA, 21 nt, Artificial Sequence
  Description of Artificial Sequence: Synthetic oligonucleotide
uuccgaauaaacuccaggccu

SEQ ID NO: 1453 - DNA, 21 bp, Artificial Sequence
  Description of Artificial Sequence: Synthetic oligonucleotide
  Description of Combined DNA/RNA Molecule: Synthetic oligonucleotide
gccuggaguuuauucggaatt

SEQ ID NO: 1454 - RNA, 21 nt, Artificial Sequence
  Description of Artificial Sequence: Synthetic oligonucleotide
uuccgaauaaacuccaggccu

SEQ ID NO: 1455 - DNA, 21 bp, Artificial Sequence
  Description of Artificial Sequence: Synthetic oligonucleotide
  Description of Combined DNA/RNA Molecule: Synthetic oligonucleotide
gccuggaguuuauucggaatt

SEQ ID NO: 1456 - RNA, 21 nt, Artificial Sequence
  Description of Artificial Sequence: Synthetic oligonucleotide
uuccgaauaaacuccaggccu

SEQ ID NO: 1457 - DNA, 21 bp, Artificial Sequence
  Description of Artificial Sequence: Synthetic oligonucleotide
  Description of Combined DNA/RNA Molecule: Synthetic oligonucleotide
gccuggaguuuauucggaatt

SEQ ID NO: 1458 - DNA, 21 bp, Artificial Sequence
  Description of Artificial Sequence: Synthetic oligonucleotide
  Description of Combined DNA/RNA Molecule: Synthetic oligonucleotide
uuccgaauaaacuccaggctt

SEQ ID NO: 1459 - DNA, 21 bp, Artificial Sequence
  Description of Artificial Sequence: Synthetic oligonucleotide
  Description of Combined DNA/RNA Molecule: Synthetic oligonucleotide
gccuggaguuuauucggaatt

SEQ ID NO: 1460 - DNA, 21 bp, Artificial Sequence
  Description of Artificial Sequence: Synthetic oligonucleotide
  Description of Combined DNA/RNA Molecule: Synthetic oligonucleotide
uuccgaauaaacuccaggctt

SEQ ID NO: 1461 - DNA, 21 bp, Artificial Sequence
  Description of Artificial Sequence: Synthetic oligonucleotide
  Description of Combined DNA/RNA Molecule: Synthetic oligonucleotide
gccuggaguuuauucggaatt

SEQ ID NO: 1462 - DNA, 21 bp, Artificial Sequence
  Description of Artificial Sequence: Synthetic oligonucleotide
  Description of Combined DNA/RNA Molecule: Synthetic oligonucleotide
uuccgaauaaacuccaggctt

SEQ ID NO: 1463 - DNA, 21 bp, Artificial Sequence
  Description of Artificial Sequence: Synthetic oligonucleotide
  Description of Combined DNA/RNA Molecule: Synthetic oligonucleotide
gccuggaguuuauucggaatt

SEQ ID NO: 1464 - DNA, 21 bp, Artificial Sequence
  Description of Artificial Sequence: Synthetic oligonucleotide
  Description of Combined DNA/RNA Molecule: Synthetic oligonucleotide
uuccgaauaaacuccaggctt

SEQ ID NO: 1465 - DNA, 22 bp, Artificial Sequence
  Description of Artificial Sequence: Synthetic oligonucleotide
  Description of Combined DNA/RNA Molecule: Synthetic oligonucleotide
  modified_base (7)..(7): a, c, t, g, unknown or other
gccuggnaguuuauucggaatt

SEQ ID NO: 1466 - DNA, 21 bp, Artificial Sequence
  Description of Artificial Sequence: Synthetic oligonucleotide
  Description of Combined DNA/RNA Molecule: Synthetic oligonucleotide
uuccgaauaaacuccaggctt

SEQ ID NO: 1467 - RNA, 19 nt, Artificial Sequence
  Description of Artificial Sequence: Synthetic oligonucleotide
gccuggaguuuauucggaa

SEQ ID NO: 1468 - DNA, 21 bp, Artificial Sequence
  Description of Artificial Sequence: Synthetic oligonucleotide
  Description of Combined DNA/RNA Molecule: Synthetic oligonucleotide
uuccgaauaaacuccaggctt

SEQ ID NO: 1469 - RNA, 20 nt, Artificial Sequence
  Description of Artificial Sequence: Synthetic oligonucleotide
gccuggagguuuauucggaa

SEQ ID NO: 1470 - RNA, 21 nt, Artificial Sequence
  Description of Artificial Sequence: Synthetic oligonucleotide
uuccgaauaaacuccaggccu

SEQ ID NO: 1471 - RNA, 20 nt, Artificial Sequence
  Description of Artificial Sequence: Synthetic oligonucleotide
gccuggagguuuauucggaa

SEQ ID NO: 1472 - RNA, 19 nt, Artificial Sequence
  Description of Artificial Sequence: Synthetic oligonucleotide
uuccgaauaaacuccaggc

SEQ ID NO: 1473 - RNA, 20 nt, Artificial Sequence
  Description of Artificial Sequence: Synthetic oligonucleotide
gccuggagguuuauucggaa

SEQ ID NO: 1474 - RNA, 21 nt, Artificial Sequence
  Description of Artificial Sequence: Synthetic oligonucleotide
uuccgaauaaacuccaggccu

SEQ ID NO: 1475 - RNA, 20 nt, Artificial Sequence
  Description of Artificial Sequence: Synthetic oligonucleotide
gccuggagguuuauucggaa

SEQ ID NO: 1476 - RNA, 21 nt, Artificial Sequence
  Description of Artificial Sequence: Synthetic oligonucleotide
uuccgaauaaacuccaggccu

SEQ ID NO: 1477 - RNA, 20 nt, Artificial Sequence
  Description of Artificial Sequence: Synthetic oligonucleotide
gccuggagguuuauucggaa

SEQ ID NO: 1478 - RNA, 19 nt, Artificial Sequence
  Description of Artificial Sequence: Synthetic oligonucleotide
uuccgaauaaacuccaggc

SEQ ID NO: 1479 - RNA, 20 nt, Artificial Sequence
  Description of Artificial Sequence: Synthetic oligonucleotide
gccuggagguuuauucggaa

SEQ ID NO: 1480 - DNA, 21 bp, Artificial Sequence
  Description of Artificial Sequence: Synthetic oligonucleotide
  Description of Combined DNA/RNA Molecule: Synthetic oligonucleotide
uuccgaauaaacuccaggctt

SEQ ID NO: 1481 - RNA, 20 nt, Artificial Sequence
  Description of Artificial Sequence: Synthetic oligonucleotide
gccuggagguuuauucggaa

SEQ ID NO: 1482 - DNA, 21 bp, Artificial Sequence
  Description of Artificial Sequence: Synthetic oligonucleotide
  Description of Combined DNA/RNA Molecule: Synthetic oligonucleotide
uuccgaauaaacuccaggctt

SEQ ID NO: 1483 - RNA, 20 nt, Artificial Sequence
  Description of Artificial Sequence: Synthetic oligonucleotide
gccuggagguuuauucggaa

SEQ ID NO: 1484 - DNA, 21 bp, Artificial Sequence
  Description of Artificial Sequence: Synthetic oligonucleotide
  Description of Combined DNA/RNA Molecule: Synthetic oligonucleotide
uuccgaauaaacuccaggctt

SEQ ID NO: 1485 - DNA, 21 bp, Artificial Sequence
  Description of Artificial Sequence: Synthetic oligonucleotide
  Description of Combined DNA/RNA Molecule: Synthetic oligonucleotide
gccuggaguuuauucggaatt

SEQ ID NO: 1486 - RNA, 21 nt, Artificial Sequence
  Description of Artificial Sequence: Synthetic oligonucleotide
uuccgaauaaacuccaggccu

SEQ ID NO: 1487 - RNA, 19 nt, Artificial Sequence
  Description of Artificial Sequence: Synthetic oligonucleotide
gccuggaguuuauucggaa

SEQ ID NO: 1488 - RNA, 21 nt, Artificial Sequence
  Description of Artificial Sequence: Synthetic oligonucleotide
uuccgaauaaacuccaggccu

SEQ ID NO: 1489 - RNA, 19 nt, Artificial Sequence
  Description of Artificial Sequence: Synthetic oligonucleotide
gccuggaguuuauucggaa

SEQ ID NO: 1490 - RNA, 21 nt, Artificial Sequence
  Description of Artificial Sequence: Synthetic oligonucleotide
uuccgaauaaacuccaggccu

SEQ ID NO: 1491 - DNA, 21 bp, Artificial Sequence
  Description of Artificial Sequence: Synthetic oligonucleotide
  Description of Combined DNA/RNA Molecule: Synthetic oligonucleotide
gccuggaguuuauucggaatt

SEQ ID NO: 1492 - RNA, 21 nt, Artificial Sequence
  Description of Artificial Sequence: Synthetic oligonucleotide
uuccgaauaaacuccaggccu

SEQ ID NO: 1493 - DNA, 22 bp, Artificial Sequence
  Description of Artificial Sequence: Synthetic oligonucleotide
  Description of Combined DNA/RNA Molecule: Synthetic oligonucleotide
  modified_base (7)..(7): a, c, t, g, unknown or other
gccuggnaguuuauucggaatt

SEQ ID NO: 1494 - RNA, 21 nt, Artificial Sequence
  Description of Artificial Sequence: Synthetic oligonucleotide
uuccgaauaaacuccaggccu

SEQ ID NO: 1495 - DNA, 21 bp, Artificial Sequence
  Description of Artificial Sequence: Synthetic oligonucleotide
  Description of Combined DNA/RNA Molecule: Synthetic oligonucleotide
gccuggaguuuauucggaatt

SEQ ID NO: 1496 - RNA, 21 nt, Artificial Sequence
  Description of Artificial Sequence: Synthetic oligonucleotide
uuccgaauaaacuccaggccu

SEQ ID NO: 1497 - DNA, 21 bp, Artificial Sequence
  Description of Artificial Sequence: Synthetic oligonucleotide
  Description of Combined DNA/RNA Molecule: Synthetic oligonucleotide
gccuggaguuuauucggaatt

SEQ ID NO: 1498 - RNA, 21 nt, Artificial Sequence
  Description of Artificial Sequence: Synthetic oligonucleotide
uuccgaauaaacuccaggccu

SEQ ID NO: 1499 - RNA, 19 nt, Artificial Sequence
  Description of Artificial Sequence: Synthetic oligonucleotide
gccuggaguuuauucggaa

SEQ ID NO: 1500 - RNA, 21 nt, Artificial Sequence
  Description of Artificial Sequence: Synthetic oligonucleotide
uuccgaauaaacuccaggccu

SEQ ID NO: 1501 - RNA, 20 nt, Artificial Sequence
  Description of Artificial Sequence: Synthetic oligonucleotide
gccuggagguuuauucggaa

SEQ ID NO: 1502 - RNA, 21 nt, Artificial Sequence
  Description of Artificial Sequence: Synthetic oligonucleotide
uuccgaauaaacuccaggccu

SEQ ID NO: 1503 - DNA, 21 bp, Artificial Sequence
  Description of Artificial Sequence: Synthetic oligonucleotide
  Description of Combined DNA/RNA Molecule: Synthetic oligonucleotide
gccuggaguuuauucggaatt

SEQ ID NO: 1504 - DNA, 21 bp, Artificial Sequence
  Description of Artificial Sequence: Synthetic oligonucleotide
  Description of Combined DNA/RNA Molecule: Synthetic oligonucleotide
uuccgaauaaacuccaggctt

SEQ ID NO: 1505 - DNA, 21 bp, Artificial Sequence
  Description of Artificial Sequence: Synthetic oligonucleotide
  Description of Combined DNA/RNA Molecule: Synthetic oligonucleotide
gccuggaguuuauucggaatt

SEQ ID NO: 1506 - DNA, 21 bp, Artificial Sequence
  Description of Artificial Sequence: Synthetic oligonucleotide
  Description of Combined DNA/RNA Molecule: Synthetic oligonucleotide
uuccgaauaaacuccaggctt

SEQ ID NO: 1507 - DNA, 21 bp, Artificial Sequence
  Description of Artificial Sequence: Synthetic oligonucleotide
  Description of Combined DNA/RNA Molecule: Synthetic oligonucleotide
gccuggaguuuauucggaatt

SEQ ID NO: 1508 - DNA, 21 bp, Artificial Sequence
  Description of Artificial Sequence: Synthetic oligonucleotide
  Description of Combined DNA/RNA Molecule: Synthetic oligonucleotide
uuccgaauaaacuccaggctt

SEQ ID NO: 1509 - DNA, 21 bp, Artificial Sequence
  Description of Artificial Sequence: Synthetic oligonucleotide
  Description of Combined DNA/RNA Molecule: Synthetic oligonucleotide
gccuggaguuuauucggaatt

SEQ ID NO: 1510 - DNA, 21 bp, Artificial Sequence
  Description of Artificial Sequence: Synthetic oligonucleotide
  Description of Combined DNA/RNA Molecule: Synthetic oligonucleotide
uuccgaauaaacuccaggctt

SEQ ID NO: 1511 - DNA, 21 bp, Artificial Sequence
  Description of Artificial Sequence: Synthetic oligonucleotide
  Description of Combined DNA/RNA Molecule: Synthetic oligonucleotide
gccuggaguuuauucggaatt

SEQ ID NO: 1512 - DNA, 21 bp, Artificial Sequence
  Description of Artificial Sequence: Synthetic oligonucleotide
  Description of Combined DNA/RNA Molecule: Synthetic oligonucleotide
uuccgaauaaacuccaggctt

SEQ ID NO: 1513 - DNA, 21 bp, Artificial Sequence
  Description of Artificial Sequence: Synthetic oligonucleotide
  Description of Combined DNA/RNA Molecule: Synthetic oligonucleotide
gccuggaguuuauucggaatt

SEQ ID NO: 1514 - DNA, 21 bp, Artificial Sequence
  Description of Artificial Sequence: Synthetic oligonucleotide
  Description of Combined DNA/RNA Molecule: Synthetic oligonucleotide
uuccgaauaaacuccaggctt

SEQ ID NO: 1515 - DNA, 21 bp, Artificial Sequence
  Description of Artificial Sequence: Synthetic oligonucleotide
  Description of Combined DNA/RNA Molecule: Synthetic oligonucleotide
uucuagaccuguuuugcuutt

SEQ ID NO: 1516 - DNA, 21 bp, Artificial Sequence
  Description of Artificial Sequence: Synthetic oligonucleotide
  Description of Combined DNA/RNA Molecule: Synthetic oligonucleotide
aagcaaaacaggucuagaatt

SEQ ID NO: 1517 - DNA, 21 bp, Artificial Sequence
  Description of Artificial Sequence: Synthetic oligonucleotide
  Description of Combined DNA/RNA Molecule: Synthetic oligonucleotide
agguguaucuccuagacactt

SEQ ID NO: 1518 - DNA, 21 bp, Artificial Sequence
  Description of Artificial Sequence: Synthetic oligonucleotide
  Description of Combined DNA/RNA Molecule: Synthetic oligonucleotide
gugucuaggagauacaccutt

SEQ ID NO: 1519 - DNA, 21 bp, Artificial Sequence
  Description of Artificial Sequence: Synthetic oligonucleotide
  Description of Combined DNA/RNA Molecule: Synthetic oligonucleotide
cuuacgcugaguacuucgatt

SEQ ID NO: 1520 - DNA, 21 bp, Artificial Sequence
  Description of Artificial Sequence: Synthetic oligonucleotide
  Description of Combined DNA/RNA Molecule: Synthetic oligonucleotide
ucgaaguacucagcguaagtt

SEQ ID NO: 1521 - DNA, 21 bp, Artificial Sequence
  Description of Artificial Sequence: Synthetic oligonucleotide
  Description of Combined DNA/RNA Molecule: Synthetic oligonucleotide
gccuggaguuuauucggaatt

SEQ ID NO: 1522 - DNA, 21 bp, Artificial Sequence
  Description of Artificial Sequence: Synthetic oligonucleotide
  Description of Combined DNA/RNA Molecule: Synthetic oligonucleotide
uuccgaauaaacuccaggctt

SEQ ID NO: 1523 - RNA, 19 nt, Artificial Sequence
  Description of Artificial Sequence: Synthetic oligonucleotide
uucuagaccuguuuugcuu

SEQ ID NO: 1524 - RNA, 19 nt, Artificial Sequence
  Description of Artificial Sequence: Synthetic oligonucleotide
gccuggaguuuauucggaa

SEQ ID NO: 1525 - DNA, 21 bp, Artificial Sequence
  Description of Artificial Sequence: Synthetic oligonucleotide
  Description of Combined DNA/RNA Molecule: Synthetic oligonucleotide
ucauaggccuggaguuuautt

SEQ ID NO: 1526 - DNA, 21 bp, Artificial Sequence
  Description of Artificial Sequence: Synthetic oligonucleotide
  Description of Combined DNA/RNA Molecule: Synthetic oligonucleotide
auaaacuccaggccuaugatt

SEQ ID NO: 1527 - DNA, 21 bp, Artificial Sequence
  Description of Artificial Sequence: Synthetic oligonucleotide
  Description of Combined DNA/RNA Molecule: Synthetic oligonucleotide
ucauaggccuggaguuuautt

SEQ ID NO: 1528 - DNA, 21 bp, Artificial Sequence
  Description of Artificial Sequence: Synthetic oligonucleotide
  Description of Combined DNA/RNA Molecule: Synthetic oligonucleotide
auaaacuccaggccuaugatt

SEQ ID NO: 1529 - DNA, 21 bp, Artificial Sequence
  Description of Artificial Sequence: Synthetic oligonucleotide
  Description of Combined DNA/RNA Molecule: Synthetic oligonucleotide
ucauaggccuggaguuuautt

SEQ ID NO: 1530 - DNA, 21 bp, Artificial Sequence
  Description of Artificial Sequence: Synthetic oligonucleotide
  Description of Combined DNA/RNA Molecule: Synthetic oligonucleotide
auaaacuccaggccuaugatt

SEQ ID NO: 1531 - DNA, 21 bp, Artificial Sequence
  Description of Artificial Sequence: Synthetic oligonucleotide
  Description of Combined DNA/RNA Molecule: Synthetic oligonucleotide
uucuagaccuguuuugcuutt

SEQ ID NO: 1532 - DNA, 21 bp, Artificial Sequence
  Description of Artificial Sequence: Synthetic oligonucleotide
  Description of Combined DNA/RNA Molecule: Synthetic oligonucleotide
aagcaaaacaggucuagaatt

SEQ ID NO: 1533-1534 - skipped (2 entries)

SEQ ID NO: 1535 - DNA, 21 bp, Artificial Sequence
  Description of Artificial Sequence: Synthetic oligonucleotide
  Description of Combined DNA/RNA Molecule: Synthetic oligonucleotide
uucuagaccuguuuugcuutt

SEQ ID NO: 1536 - DNA, 21 bp, Artificial Sequence
  Description of Artificial Sequence: Synthetic oligonucleotide
  Description of Combined DNA/RNA Molecule: Synthetic oligonucleotide
aagcaaaacaggucuagaatt

SEQ ID NO: 1537 - DNA, 21 bp, Artificial Sequence
  Description of Artificial Sequence: Synthetic oligonucleotide
  Description of Combined DNA/RNA Molecule: Synthetic oligonucleotide
uucuagaccuguuuugcuutt

SEQ ID NO: 1538 - DNA, 21 bp, Artificial Sequence
  Description of Artificial Sequence: Synthetic oligonucleotide
  Description of Combined DNA/RNA Molecule: Synthetic oligonucleotide
aagcaaaacaggucuagaatt

SEQ ID NO: 1539 - DNA, 21 bp, Artificial Sequence
  Description of Artificial Sequence: Synthetic oligonucleotide
  Description of Combined DNA/RNA Molecule: Synthetic oligonucleotide
uucuagaccuguuuugcuutt

SEQ ID NO: 1540 - DNA, 21 bp, Artificial Sequence
  Description of Artificial Sequence: Synthetic oligonucleotide
  Description of Combined DNA/RNA Molecule: Synthetic oligonucleotide
aagcaaaacaggucuagaatt

SEQ ID NO: 1541 - DNA, 21 bp, Artificial Sequence
  Description of Artificial Sequence: Synthetic oligonucleotide
  Description of Combined DNA/RNA Molecule: Synthetic oligonucleotide
  modified_base (9)..(9): Difluorotoluyl ribo(or deoxyribo)nucleotide
uucuagacnuguuuugcuutt

SEQ ID NO: 1542 - DNA, 21 bp, Artificial Sequence
  Description of Artificial Sequence: Synthetic oligonucleotide
  Description of Combined DNA/RNA Molecule: Synthetic oligonucleotide
aagcaaaacaggucuagaatt

SEQ ID NO: 1543 - DNA, 21 bp, Artificial Sequence
  Description of Artificial Sequence: Synthetic oligonucleotide
  Description of Combined DNA/RNA Molecule: Synthetic oligonucleotide
  modified_base (9)..(9): Difluorotoluyl ribo(or deoxyribo)nucleotide
uucuagacnuguuuugcuutt

SEQ ID NO: 1544 - DNA, 21 bp, Artificial Sequence
  Description of Artificial Sequence: Synthetic oligonucleotide
  Description of Combined DNA/RNA Molecule: Synthetic oligonucleotide
aagcaaaacaggucuagaatt

SEQ ID NO: 1545 - DNA, 21 bp, Artificial Sequence
  Description of Artificial Sequence: Synthetic oligonucleotide
  Description of Combined DNA/RNA Molecule: Synthetic oligonucleotide
  modified_base (10)..(10): Difluorotoluyl ribo(or deoxyribo)nucleotide
uucuagaccnguuuugcuutt

SEQ ID NO: 1546 - DNA, 21 bp, Artificial Sequence
  Description of Artificial Sequence: Synthetic oligonucleotide
  Description of Combined DNA/RNA Molecule: Synthetic oligonucleotide
aagcaaaacaggucuagaatt

SEQ ID NO: 1547 - DNA, 21 bp, Artificial Sequence
  Description of Artificial Sequence: Synthetic oligonucleotide
  Description of Combined DNA/RNA Molecule: Synthetic oligonucleotide
  modified_base (10)..(10): Difluorotoluyl ribo(or deoxyribo)nucleotide
uucuagaccnguuuugcuutt

SEQ ID NO: 1548 - DNA, 21 bp, Artificial Sequence
  Description of Artificial Sequence: Synthetic oligonucleotide
  Description of Combined DNA/RNA Molecule: Synthetic oligonucleotide
aagcaaaacaggucuagaatt

SEQ ID NO: 1549 - DNA, 21 bp, Artificial Sequence
  Description of Artificial Sequence: Synthetic oligonucleotide
  Description of Combined DNA/RNA Molecule: Synthetic oligonucleotide
  modified_base (11)..(11): Difluorotoluyl ribo(or deoxyribo)nucleotide
uucuagaccunuuuugcuutt

SEQ ID NO: 1550 - DNA, 21 bp, Artificial Sequence
  Description of Artificial Sequence: Synthetic oligonucleotide
  Description of Combined DNA/RNA Molecule: Synthetic oligonucleotide
aagcaaaacaggucuagaatt

SEQ ID NO: 1551 - DNA, 21 bp, Artificial Sequence
  Description of Artificial Sequence: Synthetic oligonucleotide
  Description of Combined DNA/RNA Molecule: Synthetic oligonucleotide
  modified_base (11)..(11): Difluorotoluyl ribo(or deoxyribo)nucleotide
uucuagaccunuuuugcuutt

SEQ ID NO: 1552 - DNA, 21 bp, Artificial Sequence
  Description of Artificial Sequence: Synthetic oligonucleotide
  Description of Combined DNA/RNA Molecule: Synthetic oligonucleotide
aagcaaaacaggucuagaatt

SEQ ID NO: 1553 - DNA, 21 bp, Artificial Sequence
  Description of Artificial Sequence: Synthetic oligonucleotide
  Description of Combined DNA/RNA Molecule: Synthetic oligonucleotide
uucuagaccuguuuugcuutt

SEQ ID NO: 1554 - DNA, 21 bp, Artificial Sequence
  Description of Artificial Sequence: Synthetic oligonucleotide
  Description of Combined DNA/RNA Molecule: Synthetic oligonucleotide
aagcaaaacaggucuagaatt

SEQ ID NO: 1555 - DNA, 21 bp, Artificial Sequence
  Description of Artificial Sequence: Synthetic oligonucleotide
  Description of Combined DNA/RNA Molecule: Synthetic oligonucleotide
uucuagaccuguuuugcuutt

SEQ ID NO: 1556 - DNA, 21 bp, Artificial Sequence
  Description of Artificial Sequence: Synthetic oligonucleotide
  Description of Combined DNA/RNA Molecule: Synthetic oligonucleotide
aagcaaaacaggucuagaatt

SEQ ID NO: 1557 - DNA, 21 bp, Artificial Sequence
  Description of Artificial Sequence: Synthetic oligonucleotide
  Description of Combined DNA/RNA Molecule: Synthetic oligonucleotide
uucuagaccuguuuugcuutt

SEQ ID NO: 1558 - DNA, 21 bp, Artificial Sequence
  Description of Artificial Sequence: Synthetic oligonucleotide
  Description of Combined DNA/RNA Molecule: Synthetic oligonucleotide
aagcaaaacaggucuagaatt

SEQ ID NO: 1559 - DNA, 21 bp, Artificial Sequence
  Description of Artificial Sequence: Synthetic oligonucleotide
  Description of Combined DNA/RNA Molecule: Synthetic oligonucleotide
uucuagaccuguuuugcuutt

SEQ ID NO: 1560 - DNA, 21 bp, Artificial Sequence
  Description of Artificial Sequence: Synthetic oligonucleotide
  Description of Combined DNA/RNA Molecule: Synthetic oligonucleotide
aagcaaaacaggucuagaatt

SEQ ID NO: 1561 - DNA, 21 bp, Artificial Sequence
  Description of Artificial Sequence: Synthetic oligonucleotide
  Description of Combined DNA/RNA Molecule: Synthetic oligonucleotide
  modified_base (9)..(9): Difluorotoluyl ribo(or deoxyribo)nucleotide
uucuagacnuguuuugcuutt

SEQ ID NO: 1562 - DNA, 21 bp, Artificial Sequence
  Description of Artificial Sequence: Synthetic oligonucleotide
  Description of Combined DNA/RNA Molecule: Synthetic oligonucleotide
aagcaaaacaggucuagaatt

SEQ ID NO: 1563 - DNA, 21 bp, Artificial Sequence
  Description of Artificial Sequence: Synthetic oligonucleotide
  Description of Combined DNA/RNA Molecule: Synthetic oligonucleotide
  modified_base (9)..(9): Difluorotoluyl ribo(or deoxyribo)nucleotide
uucuagacnuguuuugcuutt

SEQ ID NO: 1564 - DNA, 21 bp, Artificial Sequence
  Description of Artificial Sequence: Synthetic oligonucleotide
  Description of Combined DNA/RNA Molecule: Synthetic oligonucleotide
aagcaaaacaggucuagaatt

SEQ ID NO: 1565 - DNA, 21 bp, Artificial Sequence
  Description of Artificial Sequence: Synthetic oligonucleotide
  Description of Combined DNA/RNA Molecule: Synthetic oligonucleotide
  modified_base (10)..(10): Difluorotoluyl ribo(or deoxyribo)nucleotide
uucuagaccnguuuugcuutt

SEQ ID NO: 1566 - DNA, 21 bp, Artificial Sequence
  Description of Artificial Sequence: Synthetic oligonucleotide
  Description of Combined DNA/RNA Molecule: Synthetic oligonucleotide
aagcaaaacaggucuagaatt

SEQ ID NO: 1567 - DNA, 21 bp, Artificial Sequence
  Description of Artificial Sequence: Synthetic oligonucleotide
  Description of Combined DNA/RNA Molecule: Synthetic oligonucleotide
  modified_base (10)..(10): Difluorotoluyl ribo(or deoxyribo)nucleotide
uucuagaccnguuuugcuutt

SEQ ID NO: 1568 - DNA, 21 bp, Artificial Sequence
  Description of Artificial Sequence: Synthetic oligonucleotide
  Description of Combined DNA/RNA Molecule: Synthetic oligonucleotide
aagcaaaacaggucuagaatt

SEQ ID NO: 1569 - DNA, 21 bp, Artificial Sequence
  Description of Artificial Sequence: Synthetic oligonucleotide
  Description of Combined DNA/RNA Molecule: Synthetic oligonucleotide
  modified_base (11)..(11): Difluorotoluyl ribo(or deoxyribo)nucleotide
uucuagaccunuuuugcuutt

SEQ ID NO: 1570 - DNA, 21 bp, Artificial Sequence
  Description of Artificial Sequence: Synthetic oligonucleotide
  Description of Combined DNA/RNA Molecule: Synthetic oligonucleotide
aagcaaaacaggucuagaatt

SEQ ID NO: 1571 - DNA, 21 bp, Artificial Sequence
  Description of Artificial Sequence: Synthetic oligonucleotide
  Description of Combined DNA/RNA Molecule: Synthetic oligonucleotide
  modified_base (11)..(11): Difluorotoluyl ribo(or deoxyribo)nucleotide
uucuagaccunuuuugcuutt

SEQ ID NO: 1572 - DNA, 21 bp, Artificial Sequence
  Description of Artificial Sequence: Synthetic oligonucleotide
  Description of Combined DNA/RNA Molecule: Synthetic oligonucleotide
aagcaaaacaggucuagaatt

SEQ ID NO: 1573 - DNA, 21 bp, Artificial Sequence
  Description of Artificial Sequence: Synthetic oligonucleotide
  Description of Combined DNA/RNA Molecule: Synthetic oligonucleotide
  modified_base (10)..(10): Difluorotoluyl ribo(or deoxyribo)nucleotide
gccuggagunuauucggaatt

SEQ ID NO: 1574 - DNA, 21 bp, Artificial Sequence
  Description of Artificial Sequence: Synthetic oligonucleotide
  Description of Combined DNA/RNA Molecule: Synthetic oligonucleotide
uuccgaauaaacuccaggctt

SEQ ID NO: 1575 - DNA, 21 bp, Artificial Sequence
  Description of Artificial Sequence: Synthetic oligonucleotide
  Description of Combined DNA/RNA Molecule: Synthetic oligonucleotide
  modified_base (10)..(10): Difluorotoluyl ribo(or deoxyribo)nucleotide
gccuggagunuauucggaatt

SEQ ID NO: 1576 - DNA, 21 bp, Artificial Sequence
  Description of Artificial Sequence: Synthetic oligonucleotide
  Description of Combined DNA/RNA Molecule: Synthetic oligonucleotide
uuccgaauaaacuccaggctt

SEQ ID NO: 1577 - DNA, 21 bp, Artificial Sequence
  Description of Artificial Sequence: Synthetic oligonucleotide
  Description of Combined DNA/RNA Molecule: Synthetic oligonucleotide
cagccaacuuuucuagacctt

SEQ ID NO: 1578 - DNA, 21 bp, Artificial Sequence
  Description of Artificial Sequence: Synthetic oligonucleotide
  Description of Combined DNA/RNA Molecule: Synthetic oligonucleotide
ggucuagaaaaguuggcugtt

SEQ ID NO: 1579 - DNA, 21 bp, Artificial Sequence
  Description of Artificial Sequence: Synthetic oligonucleotide
  Description of Combined DNA/RNA Molecule: Synthetic oligonucleotide
agccaacuuuucuagaccutt

SEQ ID NO: 1580 - DNA, 21 bp, Artificial Sequence
  Description of Artificial Sequence: Synthetic oligonucleotide
  Description of Combined DNA/RNA Molecule: Synthetic oligonucleotide
aggucuagaaaaguuggcutt

SEQ ID NO: 1581 - DNA, 21 bp, Artificial Sequence
  Description of Artificial Sequence: Synthetic oligonucleotide
  Description of Combined DNA/RNA Molecule: Synthetic oligonucleotide
gccaacuuuucuagaccugtt

SEQ ID NO: 1582 - DNA, 21 bp, Artificial Sequence
  Description of Artificial Sequence: Synthetic oligonucleotide
  Description of Combined DNA/RNA Molecule: Synthetic oligonucleotide
caggucuagaaaaguuggctt

SEQ ID NO: 1583 - DNA, 21 bp, Artificial Sequence
  Description of Artificial Sequence: Synthetic oligonucleotide
  Description of Combined DNA/RNA Molecule: Synthetic oligonucleotide
ccaacuuuucuagaccugutt

SEQ ID NO: 1584 - DNA, 21 bp, Artificial Sequence
  Description of Artificial Sequence: Synthetic oligonucleotide
  Description of Combined DNA/RNA Molecule: Synthetic oligonucleotide
acaggucuagaaaaguuggtt

SEQ ID NO: 1585 - DNA, 21 bp, Artificial Sequence
  Description of Artificial Sequence: Synthetic oligonucleotide
  Description of Combined DNA/RNA Molecule: Synthetic oligonucleotide
caacuuuucuagaccuguutt

SEQ ID NO: 1586 - DNA, 21 bp, Artificial Sequence
  Description of Artificial Sequence: Synthetic oligonucleotide
  Description of Combined DNA/RNA Molecule: Synthetic oligonucleotide
aacaggucuagaaaaguugtt

SEQ ID NO: 1587 - DNA, 21 bp, Artificial Sequence
  Description of Artificial Sequence: Synthetic oligonucleotide
  Description of Combined DNA/RNA Molecule: Synthetic oligonucleotide
aacuuuucuagaccuguuutt

SEQ ID NO: 1588 - DNA, 21 bp, Artificial Sequence
  Description of Artificial Sequence: Synthetic oligonucleotide
  Description of Combined DNA/RNA Molecule: Synthetic oligonucleotide
aaacaggucuagaaaaguutt

SEQ ID NO: 1589 - DNA, 21 bp, Artificial Sequence
  Description of Artificial Sequence: Synthetic oligonucleotide
  Description of Combined DNA/RNA Molecule: Synthetic oligonucleotide
acuuuucuagaccuguuuutt

SEQ ID NO: 1590 - DNA, 21 bp, Artificial Sequence
  Description of Artificial Sequence: Synthetic oligonucleotide
  Description of Combined DNA/RNA Molecule: Synthetic oligonucleotide
aaaacaggucuagaaaagutt

SEQ ID NO: 1591 - DNA, 21 bp, Artificial Sequence
  Description of Artificial Sequence: Synthetic oligonucleotide
  Description of Combined DNA/RNA Molecule: Synthetic oligonucleotide
cuuuucuagaccuguuuugtt

SEQ ID NO: 1592 - DNA, 21 bp, Artificial Sequence
  Description of Artificial Sequence: Synthetic oligonucleotide
  Description of Combined DNA/RNA Molecule: Synthetic oligonucleotide
caaaacaggucuagaaaagtt

SEQ ID NO: 1593 - DNA, 21 bp, Artificial Sequence
  Description of Artificial Sequence: Synthetic oligonucleotide
  Description of Combined DNA/RNA Molecule: Synthetic oligonucleotide
uuuucuagaccuguuuugctt

SEQ ID NO: 1594 - DNA, 21 bp, Artificial Sequence
  Description of Artificial Sequence: Synthetic oligonucleotide
  Description of Combined DNA/RNA Molecule: Synthetic oligonucleotide
gcaaaacaggucuagaaaatt

SEQ ID NO: 1595 - DNA, 21 bp, Artificial Sequence
  Description of Artificial Sequence: Synthetic oligonucleotide
  Description of Combined DNA/RNA Molecule: Synthetic oligonucleotide
uuucuagaccuguuuugcutt

SEQ ID NO: 1596 - DNA, 21 bp, Artificial Sequence
  Description of Artificial Sequence: Synthetic oligonucleotide
  Description of Combined DNA/RNA Molecule: Synthetic oligonucleotide
agcaaaacaggucuagaaatt

SEQ ID NO: 1597 - DNA, 21 bp, Artificial Sequence
  Description of Artificial Sequence: Synthetic oligonucleotide
  Description of Combined DNA/RNA Molecule: Synthetic oligonucleotide
ucuagaccuguuuugcuuutt

SEQ ID NO: 1598 - DNA, 21 bp, Artificial Sequence
  Description of Artificial Sequence: Synthetic oligonucleotide
  Description of Combined DNA/RNA Molecule: Synthetic oligonucleotide
aaagcaaaacaggucuagatt

SEQ ID NO: 1599 - DNA, 21 bp, Artificial Sequence
  Description of Artificial Sequence: Synthetic oligonucleotide
  Description of Combined DNA/RNA Molecule: Synthetic oligonucleotide
cuagaccuguuuugcuuuutt

SEQ ID NO: 1600 - DNA, 21 bp, Artificial Sequence
  Description of Artificial Sequence: Synthetic oligonucleotide
  Description of Combined DNA/RNA Molecule: Synthetic oligonucleotide
aaaagcaaaacaggucuagtt

SEQ ID NO: 1601 - DNA, 21 bp, Artificial Sequence
  Description of Artificial Sequence: Synthetic oligonucleotide
  Description of Combined DNA/RNA Molecule: Synthetic oligonucleotide
uagaccuguuuugcuuuugtt

SEQ ID NO: 1602 - DNA, 21 bp, Artificial Sequence
  Description of Artificial Sequence: Synthetic oligonucleotide
  Description of Combined DNA/RNA Molecule: Synthetic oligonucleotide
caaaagcaaaacaggucuatt

SEQ ID NO: 1603 - DNA, 21 bp, Artificial Sequence
  Description of Artificial Sequence: Synthetic oligonucleotide
  Description of Combined DNA/RNA Molecule: Synthetic oligonucleotide
agaccuguuuugcuuuugutt

SEQ ID NO: 1604 - DNA, 21 bp, Artificial Sequence
  Description of Artificial Sequence: Synthetic oligonucleotide
  Description of Combined DNA/RNA Molecule: Synthetic oligonucleotide
acaaaagcaaaacaggucutt

SEQ ID NO: 1605 - DNA, 21 bp, Artificial Sequence
  Description of Artificial Sequence: Synthetic oligonucleotide
  Description of Combined DNA/RNA Molecule: Synthetic oligonucleotide
gaccuguuuugcuuuuguatt

SEQ ID NO: 1606 - DNA, 21 bp, Artificial Sequence
  Description of Artificial Sequence: Synthetic oligonucleotide
  Description of Combined DNA/RNA Molecule: Synthetic oligonucleotide
uacaaaagcaaaacagguctt

SEQ ID NO: 1607 - DNA, 21 bp, Artificial Sequence
  Description of Artificial Sequence: Synthetic oligonucleotide
  Description of Combined DNA/RNA Molecule: Synthetic oligonucleotide
accuguuuugcuuuuguaatt

SEQ ID NO: 1608 - DNA, 21 bp, Artificial Sequence
  Description of Artificial Sequence: Synthetic oligonucleotide
  Description of Combined DNA/RNA Molecule: Synthetic oligonucleotide
uuacaaaagcaaaacaggutt

SEQ ID NO: 1609 - DNA, 21 bp, Artificial Sequence
  Description of Artificial Sequence: Synthetic oligonucleotide
  Description of Combined DNA/RNA Molecule: Synthetic oligonucleotide
ccuguuuugcuuuuguaactt

SEQ ID NO: 1610 - DNA, 21 bp, Artificial Sequence
  Description of Artificial Sequence: Synthetic oligonucleotide
  Description of Combined DNA/RNA Molecule: Synthetic oligonucleotide
guuacaaaagcaaaacaggtt

SEQ ID NO: 1611 - DNA, 21 bp, Artificial Sequence
  Description of Artificial Sequence: Synthetic oligonucleotide
  Description of Combined DNA/RNA Molecule: Synthetic oligonucleotide
cuguuuugcuuuuguaacutt

SEQ ID NO: 1612 - DNA, 21 bp, Artificial Sequence
  Description of Artificial Sequence: Synthetic oligonucleotide
  Description of Combined DNA/RNA Molecule: Synthetic oligonucleotide
aguuacaaaagcaaaacagtt

SEQ ID NO: 1613 - DNA, 21 bp, Artificial Sequence
  Description of Artificial Sequence: Synthetic oligonucleotide
  Description of Combined DNA/RNA Molecule: Synthetic oligonucleotide
uguuuugcuuuuguaacuutt

SEQ ID NO: 1614 - DNA, 21 bp, Artificial Sequence
  Description of Artificial Sequence: Synthetic oligonucleotide
  Description of Combined DNA/RNA Molecule: Synthetic oligonucleotide
aaguuacaaaagcaaaacatt

SEQ ID NO: 1615 - DNA, 21 bp, Artificial Sequence
  Description of Artificial Sequence: Synthetic oligonucleotide
  Description of Combined DNA/RNA Molecule: Synthetic oligonucleotide
guuuugcuuuuguaacuugtt

SEQ ID NO: 1616 - DNA, 21 bp, Artificial Sequence
  Description of Artificial Sequence: Synthetic oligonucleotide
  Description of Combined DNA/RNA Molecule: Synthetic oligonucleotide
caaguuacaaaagcaaaactt

SEQ ID NO: 1617 - DNA, 21 bp, Artificial Sequence
  Description of Artificial Sequence: Synthetic oligonucleotide
  Description of Combined DNA/RNA Molecule: Synthetic oligonucleotide
uuuugcuuuuguaacuugatt

SEQ ID NO: 1618 - DNA, 21 bp, Artificial Sequence
  Description of Artificial Sequence: Synthetic oligonucleotide
  Description of Combined DNA/RNA Molecule: Synthetic oligonucleotide
ucaaguuacaaaagcaaaatt

SEQ ID NO: 1619 - DNA, 21 bp, Artificial Sequence
  Description of Artificial Sequence: Synthetic oligonucleotide
  Description of Combined DNA/RNA Molecule: Synthetic oligonucleotide
uuugcuuuuguaacuugaatt

SEQ ID NO: 1620 - DNA, 21 bp, Artificial Sequence
  Description of Artificial Sequence: Synthetic oligonucleotide
  Description of Combined DNA/RNA Molecule: Synthetic oligonucleotide
uucaaguuacaaaagcaaatt

SEQ ID NO: 1621 - DNA, 21 bp, Artificial Sequence
  Description of Artificial Sequence: Synthetic oligonucleotide
  Description of Combined DNA/RNA Molecule: Synthetic oligonucleotide
uugcuuuuguaacuugaagtt

SEQ ID NO: 1622 - DNA, 21 bp, Artificial Sequence
  Description of Artificial Sequence: Synthetic oligonucleotide
  Description of Combined DNA/RNA Molecule: Synthetic oligonucleotide
cuucaaguuacaaaagcaatt

SEQ ID NO: 1623 - DNA, 21 bp, Artificial Sequence
  Description of Artificial Sequence: Synthetic oligonucleotide
  Description of Combined DNA/RNA Molecule: Synthetic oligonucleotide
ugcuuuuguaacuugaagatt

SEQ ID NO: 1624 - DNA, 21 bp, Artificial Sequence
  Description of Artificial Sequence: Synthetic oligonucleotide
  Description of Combined DNA/RNA Molecule: Synthetic oligonucleotide
ucuucaaguuacaaaagcatt

SEQ ID NO: 1625 - DNA, 21 bp, Artificial Sequence
  Description of Artificial Sequence: Synthetic oligonucleotide
  Description of Combined DNA/RNA Molecule: Synthetic oligonucleotide
gcuuuuguaacuugaagautt

SEQ ID NO: 1626 - DNA, 21 bp, Artificial Sequence
  Description of Artificial Sequence: Synthetic oligonucleotide
  Description of Combined DNA/RNA Molecule: Synthetic oligonucleotide
aucuucaaguuacaaaagctt

SEQ ID NO: 1627 - DNA, 21 bp, Artificial Sequence
  Description of Artificial Sequence: Synthetic oligonucleotide
  Description of Combined DNA/RNA Molecule: Synthetic oligonucleotide
cuuuuguaacuugaagauatt

SEQ ID NO: 1628 - DNA, 21 bp, Artificial Sequence
  Description of Artificial Sequence: Synthetic oligonucleotide
  Description of Combined DNA/RNA Molecule: Synthetic oligonucleotide
uaucuucaaguuacaaaagtt

SEQ ID NO: 1629 - DNA, 21 bp, Artificial Sequence
  Description of Artificial Sequence: Synthetic oligonucleotide
  Description of Combined DNA/RNA Molecule: Synthetic oligonucleotide
uuuuguaacuugaagauautt

SEQ ID NO: 1630 - DNA, 21 bp, Artificial Sequence
  Description of Artificial Sequence: Synthetic oligonucleotide
  Description of Combined DNA/RNA Molecule: Synthetic oligonucleotide
auaucuucaaguuacaaaatt

SEQ ID NO: 1631 - DNA, 21 bp, Artificial Sequence
  Description of Artificial Sequence: Synthetic oligonucleotide
  Description of Combined DNA/RNA Molecule: Synthetic oligonucleotide
uuuguaacuugaagauauutt

SEQ ID NO: 1632 - DNA, 21 bp, Artificial Sequence
  Description of Artificial Sequence: Synthetic oligonucleotide
  Description of Combined DNA/RNA Molecule: Synthetic oligonucleotide
aauaucuucaaguuacaaatt

SEQ ID NO: 1633 - DNA, 21 bp, Artificial Sequence
  Description of Artificial Sequence: Synthetic oligonucleotide
  Description of Combined DNA/RNA Molecule: Synthetic oligonucleotide
uuguaacuugaagauauuutt

SEQ ID NO: 1634 - DNA, 21 bp, Artificial Sequence
  Description of Artificial Sequence: Synthetic oligonucleotide
  Description of Combined DNA/RNA Molecule: Synthetic oligonucleotide
aaauaucuucaaguuacaatt

SEQ ID NO: 1635 - DNA, 21 bp, Artificial Sequence
  Description of Artificial Sequence: Synthetic oligonucleotide
  Description of Combined DNA/RNA Molecule: Synthetic oligonucleotide
uguaacuugaagauauuuatt

SEQ ID NO: 1636 - DNA, 21 bp, Artificial Sequence
  Description of Artificial Sequence: Synthetic oligonucleotide
  Description of Combined DNA/RNA Molecule: Synthetic oligonucleotide
uaaauaucuucaaguuacatt

SEQ ID NO: 1637 - DNA, 21 bp, Artificial Sequence
  Description of Artificial Sequence: Synthetic oligonucleotide
  Description of Combined DNA/RNA Molecule: Synthetic oligonucleotide
guaacuugaagauauuuautt

SEQ ID NO: 1638 - DNA, 21 bp, Artificial Sequence
  Description of Artificial Sequence: Synthetic oligonucleotide
  Description of Combined DNA/RNA Molecule: Synthetic oligonucleotide
auaaauaucuucaaguuactt

SEQ ID NO: 1639 - DNA, 21 bp, Artificial Sequence
  Description of Artificial Sequence: Synthetic oligonucleotide
  Description of Combined DNA/RNA Molecule: Synthetic oligonucleotide
uaacuugaagauauuuauutt

SEQ ID NO: 1640 - DNA, 21 bp, Artificial Sequence
  Description of Artificial Sequence: Synthetic oligonucleotide
  Description of Combined DNA/RNA Molecule: Synthetic oligonucleotide
aauaaauaucuucaaguuatt

SEQ ID NO: 1641 - DNA, 21 bp, Artificial Sequence
  Description of Artificial Sequence: Synthetic oligonucleotide
  Description of Combined DNA/RNA Molecule: Synthetic oligonucleotide
aacuugaagauauuuauuctt

SEQ ID NO: 1642 - DNA, 21 bp, Artificial Sequence
  Description of Artificial Sequence: Synthetic oligonucleotide
  Description of Combined DNA/RNA Molecule: Synthetic oligonucleotide
gaauaaauaucuucaaguutt

SEQ ID NO: 1643 - DNA, 21 bp, Artificial Sequence
  Description of Artificial Sequence: Synthetic oligonucleotide
  Description of Combined DNA/RNA Molecule: Synthetic oligonucleotide
acuugaagauauuuauucutt

SEQ ID NO: 1644 - DNA, 21 bp, Artificial Sequence
  Description of Artificial Sequence: Synthetic oligonucleotide
  Description of Combined DNA/RNA Molecule: Synthetic oligonucleotide
agaauaaauaucuucaagutt

SEQ ID NO: 1645 - DNA, 21 bp, Artificial Sequence
  Description of Artificial Sequence: Synthetic oligonucleotide
  Description of Combined DNA/RNA Molecule: Synthetic oligonucleotide
cuugaagauauuuauucugtt

SEQ ID NO: 1646 - DNA, 21 bp, Artificial Sequence
  Description of Artificial Sequence: Synthetic oligonucleotide
  Description of Combined DNA/RNA Molecule: Synthetic oligonucleotide
cagaauaaauaucuucaagtt

SEQ ID NO: 1647 - DNA, 21 bp, Artificial Sequence
  Description of Artificial Sequence: Synthetic oligonucleotide
  Description of Combined DNA/RNA Molecule: Synthetic oligonucleotide
uugaagauauuuauucuggtt

SEQ ID NO: 1648 - DNA, 21 bp, Artificial Sequence
  Description of Artificial Sequence: Synthetic oligonucleotide
  Description of Combined DNA/RNA Molecule: Synthetic oligonucleotide
ccagaauaaauaucuucaatt

SEQ ID NO: 1649 - DNA, 21 bp, Artificial Sequence
  Description of Artificial Sequence: Synthetic oligonucleotide
  Description of Combined DNA/RNA Molecule: Synthetic oligonucleotide
ugaagauauuuauucugggtt

SEQ ID NO: 1650 - DNA, 21 bp, Artificial Sequence
  Description of Artificial Sequence: Synthetic oligonucleotide
  Description of Combined DNA/RNA Molecule: Synthetic oligonucleotide
cccagaauaaauaucuucatt

SEQ ID NO: 1651 - DNA, 21 bp, Artificial Sequence
  Description of Artificial Sequence: Synthetic oligonucleotide
  Description of Combined DNA/RNA Molecule: Synthetic oligonucleotide
gaagauauuuauucugggutt

SEQ ID NO: 1652 - DNA, 21 bp, Artificial Sequence
  Description of Artificial Sequence: Synthetic oligonucleotide
  Description of Combined DNA/RNA Molecule: Synthetic oligonucleotide
acccagaauaaauaucuuctt

SEQ ID NO: 1653 - DNA, 21 bp, Artificial Sequence
  Description of Artificial Sequence: Synthetic oligonucleotide
  Description of Combined DNA/RNA Molecule: Synthetic oligonucleotide
cagccaacuuuucuagacctt

SEQ ID NO: 1654 - DNA, 21 bp, Artificial Sequence
  Description of Artificial Sequence: Synthetic oligonucleotide
  Description of Combined DNA/RNA Molecule: Synthetic oligonucleotide
ggucuagaaaaguuggcugtt

SEQ ID NO: 1655 - DNA, 21 bp, Artificial Sequence
  Description of Artificial Sequence: Synthetic oligonucleotide
  Description of Combined DNA/RNA Molecule: Synthetic oligonucleotide
agccaacuuuucuagaccutt

SEQ ID NO: 1656 - DNA, 21 bp, Artificial Sequence
  Description of Artificial Sequence: Synthetic oligonucleotide
  Description of Combined DNA/RNA Molecule: Synthetic oligonucleotide
aggucuagaaaaguuggcutt

SEQ ID NO: 1657 - DNA, 21 bp, Artificial Sequence
  Description of Artificial Sequence: Synthetic oligonucleotide
  Description of Combined DNA/RNA Molecule: Synthetic oligonucleotide
gccaacuuuucuagaccugtt

SEQ ID NO: 1658 - DNA, 21 bp, Artificial Sequence
  Description of Artificial Sequence: Synthetic oligonucleotide
  Description of Combined DNA/RNA Molecule: Synthetic oligonucleotide
caggucuagaaaaguuggctt

SEQ ID NO: 1659 - DNA, 21 bp, Artificial Sequence
  Description of Artificial Sequence: Synthetic oligonucleotide
  Description of Combined DNA/RNA Molecule: Synthetic oligonucleotide
ccaacuuuucuagaccugutt

SEQ ID NO: 1660 - DNA, 21 bp, Artificial Sequence
  Description of Artificial Sequence: Synthetic oligonucleotide
  Description of Combined DNA/RNA Molecule: Synthetic oligonucleotide
acaggucuagaaaaguuggtt

SEQ ID NO: 1661 - DNA, 21 bp, Artificial Sequence
  Description of Artificial Sequence: Synthetic oligonucleotide
  Description of Combined DNA/RNA Molecule: Synthetic oligonucleotide
caacuuuucuagaccuguutt

SEQ ID NO: 1662 - DNA, 21 bp, Artificial Sequence
  Description of Artificial Sequence: Synthetic oligonucleotide
  Description of Combined DNA/RNA Molecule: Synthetic oligonucleotide
aacaggucuagaaaaguugtt

SEQ ID NO: 1663 - DNA, 21 bp, Artificial Sequence
  Description of Artificial Sequence: Synthetic oligonucleotide
  Description of Combined DNA/RNA Molecule: Synthetic oligonucleotide
aacuuuucuagaccuguuutt

SEQ ID NO: 1664 - DNA, 21 bp, Artificial Sequence
  Description of Artificial Sequence: Synthetic oligonucleotide
  Description of Combined DNA/RNA Molecule: Synthetic oligonucleotide
aaacaggucuagaaaaguutt

SEQ ID NO: 1665 - DNA, 21 bp, Artificial Sequence
  Description of Artificial Sequence: Synthetic oligonucleotide
  Description of Combined DNA/RNA Molecule: Synthetic oligonucleotide
acuuuucuagaccuguuuutt

SEQ ID NO: 1666 - DNA, 21 bp, Artificial Sequence
  Description of Artificial Sequence: Synthetic oligonucleotide
  Description of Combined DNA/RNA Molecule: Synthetic oligonucleotide
aaaacaggucuagaaaagutt

SEQ ID NO: 1667 - DNA, 21 bp, Artificial Sequence
  Description of Artificial Sequence: Synthetic oligonucleotide
  Description of Combined DNA/RNA Molecule: Synthetic oligonucleotide
cuuuucuagaccuguuuugtt

SEQ ID NO: 1668 - DNA, 21 bp, Artificial Sequence
  Description of Artificial Sequence: Synthetic oligonucleotide
  Description of Combined DNA/RNA Molecule: Synthetic oligonucleotide
caaaacaggucuagaaaagtt

SEQ ID NO: 1669 - DNA, 21 bp, Artificial Sequence
  Description of Artificial Sequence: Synthetic oligonucleotide
  Description of Combined DNA/RNA Molecule: Synthetic oligonucleotide
uuuucuagaccuguuuugctt

SEQ ID NO: 1670 - DNA, 21 bp, Artificial Sequence
  Description of Artificial Sequence: Synthetic oligonucleotide
  Description of Combined DNA/RNA Molecule: Synthetic oligonucleotide
gcaaaacaggucuagaaaatt

SEQ ID NO: 1671 - DNA, 21 bp, Artificial Sequence
  Description of Artificial Sequence: Synthetic oligonucleotide
  Description of Combined DNA/RNA Molecule: Synthetic oligonucleotide
uuucuagaccuguuuugcutt

SEQ ID NO: 1672 - DNA, 21 bp, Artificial Sequence
  Description of Artificial Sequence: Synthetic oligonucleotide
  Description of Combined DNA/RNA Molecule: Synthetic oligonucleotide
agcaaaacaggucuagaaatt

SEQ ID NO: 1673 - DNA, 21 bp, Artificial Sequence
  Description of Artificial Sequence: Synthetic oligonucleotide
  Description of Combined DNA/RNA Molecule: Synthetic oligonucleotide
ucuagaccuguuuugcuuutt

SEQ ID NO: 1674 - DNA, 21 bp, Artificial Sequence
  Description of Artificial Sequence: Synthetic oligonucleotide
  Description of Combined DNA/RNA Molecule: Synthetic oligonucleotide
aaagcaaaacaggucuagatt

SEQ ID NO: 1675 - DNA, 21 bp, Artificial Sequence
  Description of Artificial Sequence: Synthetic oligonucleotide
  Description of Combined DNA/RNA Molecule: Synthetic oligonucleotide
cuagaccuguuuugcuuuutt

SEQ ID NO: 1676 - DNA, 21 bp, Artificial Sequence
  Description of Artificial Sequence: Synthetic oligonucleotide
  Description of Combined DNA/RNA Molecule: Synthetic oligonucleotide
aaaagcaaaacaggucuagtt

SEQ ID NO: 1677 - DNA, 21 bp, Artificial Sequence
  Description of Artificial Sequence: Synthetic oligonucleotide
  Description of Combined DNA/RNA Molecule: Synthetic oligonucleotide
uagaccuguuuugcuuuugtt

SEQ ID NO: 1678 - DNA, 21 bp, Artificial Sequence
  Description of Artificial Sequence: Synthetic oligonucleotide
  Description of Combined DNA/RNA Molecule: Synthetic oligonucleotide
caaaagcaaaacaggucuatt

SEQ ID NO: 1679 - DNA, 21 bp, Artificial Sequence
  Description of Artificial Sequence: Synthetic oligonucleotide
  Description of Combined DNA/RNA Molecule: Synthetic oligonucleotide
agaccuguuuugcuuuugutt

SEQ ID NO: 1680 - DNA, 21 bp, Artificial Sequence
  Description of Artificial Sequence: Synthetic oligonucleotide
  Description of Combined DNA/RNA Molecule: Synthetic oligonucleotide
acaaaagcaaaacaggucutt

SEQ ID NO: 1681 - DNA, 21 bp, Artificial Sequence
  Description of Artificial Sequence: Synthetic oligonucleotide
  Description of Combined DNA/RNA Molecule: Synthetic oligonucleotide
gaccuguuuugcuuuuguatt

SEQ ID NO: 1682 - DNA, 21 bp, Artificial Sequence
  Description of Artificial Sequence: Synthetic oligonucleotide
  Description of Combined DNA/RNA Molecule: Synthetic oligonucleotide
uacaaaagcaaaacagguctt

SEQ ID NO: 1683 - DNA, 21 bp, Artificial Sequence
  Description of Artificial Sequence: Synthetic oligonucleotide
  Description of Combined DNA/RNA Molecule: Synthetic oligonucleotide
accuguuuugcuuuuguaatt

SEQ ID NO: 1684 - DNA, 21 bp, Artificial Sequence
  Description of Artificial Sequence: Synthetic oligonucleotide
  Description of Combined DNA/RNA Molecule: Synthetic oligonucleotide
uuacaaaagcaaaacaggutt

SEQ ID NO: 1685 - DNA, 21 bp, Artificial Sequence
  Description of Artificial Sequence: Synthetic oligonucleotide
  Description of Combined DNA/RNA Molecule: Synthetic oligonucleotide
ccuguuuugcuuuuguaactt

SEQ ID NO: 1686 - DNA, 21 bp, Artificial Sequence
  Description of Artificial Sequence: Synthetic oligonucleotide
  Description of Combined DNA/RNA Molecule: Synthetic oligonucleotide
guuacaaaagcaaaacaggtt

SEQ ID NO: 1687 - DNA, 21 bp, Artificial Sequence
  Description of Artificial Sequence: Synthetic oligonucleotide
  Description of Combined DNA/RNA Molecule: Synthetic oligonucleotide
cuguuuugcuuuuguaacutt

SEQ ID NO: 1688 - DNA, 21 bp, Artificial Sequence
  Description of Artificial Sequence: Synthetic oligonucleotide
  Description of Combined DNA/RNA Molecule: Synthetic oligonucleotide
aguuacaaaagcaaaacagtt

SEQ ID NO: 1689 - DNA, 21 bp, Artificial Sequence
  Description of Artificial Sequence: Synthetic oligonucleotide
  Description of Combined DNA/RNA Molecule: Synthetic oligonucleotide
uguuuugcuuuuguaacuutt

SEQ ID NO: 1690 - DNA, 21 bp, Artificial Sequence
  Description of Artificial Sequence: Synthetic oligonucleotide
  Description of Combined DNA/RNA Molecule: Synthetic oligonucleotide
aaguuacaaaagcaaaacatt

SEQ ID NO: 1691 - DNA, 21 bp, Artificial Sequence
  Description of Artificial Sequence: Synthetic oligonucleotide
  Description of Combined DNA/RNA Molecule: Synthetic oligonucleotide
guuuugcuuuuguaacuugtt

SEQ ID NO: 1692 - DNA, 21 bp, Artificial Sequence
  Description of Artificial Sequence: Synthetic oligonucleotide
  Description of Combined DNA/RNA Molecule: Synthetic oligonucleotide
caaguuacaaaagcaaaactt

SEQ ID NO: 1693 - DNA, 21 bp, Artificial Sequence
  Description of Artificial Sequence: Synthetic oligonucleotide
  Description of Combined DNA/RNA Molecule: Synthetic oligonucleotide
uuuugcuuuuguaacuugatt

SEQ ID NO: 1694 - DNA, 21 bp, Artificial Sequence
  Description of Artificial Sequence: Synthetic oligonucleotide
  Description of Combined DNA/RNA Molecule: Synthetic oligonucleotide
ucaaguuacaaaagcaaaatt

SEQ ID NO: 1695 - DNA, 21 bp, Artificial Sequence
  Description of Artificial Sequence: Synthetic oligonucleotide
  Description of Combined DNA/RNA Molecule: Synthetic oligonucleotide
uuugcuuuuguaacuugaatt

SEQ ID NO: 1696 - DNA, 21 bp, Artificial Sequence
  Description of Artificial Sequence: Synthetic oligonucleotide
  Description of Combined DNA/RNA Molecule: Synthetic oligonucleotide
uucaaguuacaaaagcaaatt

SEQ ID NO: 1697 - DNA, 21 bp, Artificial Sequence
  Description of Artificial Sequence: Synthetic oligonucleotide
  Description of Combined DNA/RNA Molecule: Synthetic oligonucleotide
uugcuuuuguaacuugaagtt

SEQ ID NO: 1698 - DNA, 21 bp, Artificial Sequence
  Description of Artificial Sequence: Synthetic oligonucleotide
  Description of Combined DNA/RNA Molecule: Synthetic oligonucleotide
cuucaaguuacaaaagcaatt

SEQ ID NO: 1699 - DNA, 21 bp, Artificial Sequence
  Description of Artificial Sequence: Synthetic oligonucleotide
  Description of Combined DNA/RNA Molecule: Synthetic oligonucleotide
ugcuuuuguaacuugaagatt

SEQ ID NO: 1700 - DNA, 21 bp, Artificial Sequence
  Description of Artificial Sequence: Synthetic oligonucleotide
  Description of Combined DNA/RNA Molecule: Synthetic oligonucleotide
ucuucaaguuacaaaagcatt

SEQ ID NO: 1701 - DNA, 21 bp, Artificial Sequence
  Description of Artificial Sequence: Synthetic oligonucleotide
  Description of Combined DNA/RNA Molecule: Synthetic oligonucleotide
gcuuuuguaacuugaagautt

SEQ ID NO: 1702 - DNA, 21 bp, Artificial Sequence
  Description of Artificial Sequence: Synthetic oligonucleotide
  Description of Combined DNA/RNA Molecule: Synthetic oligonucleotide
aucuucaaguuacaaaagctt

SEQ ID NO: 1703 - DNA, 21 bp, Artificial Sequence
  Description of Artificial Sequence: Synthetic oligonucleotide
  Description of Combined DNA/RNA Molecule: Synthetic oligonucleotide
cuuuuguaacuugaagauatt

SEQ ID NO: 1704 - DNA, 21 bp, Artificial Sequence
  Description of Artificial Sequence: Synthetic oligonucleotide
  Description of Combined DNA/RNA Molecule: Synthetic oligonucleotide
uaucuucaaguuacaaaagtt

SEQ ID NO: 1705 - DNA, 21 bp, Artificial Sequence
  Description of Artificial Sequence: Synthetic oligonucleotide
  Description of Combined DNA/RNA Molecule: Synthetic oligonucleotide
uuuuguaacuugaagauautt

SEQ ID NO: 1706 - DNA, 21 bp, Artificial Sequence
  Description of Artificial Sequence: Synthetic oligonucleotide
  Description of Combined DNA/RNA Molecule: Synthetic oligonucleotide
auaucuucaaguuacaaaatt

SEQ ID NO: 1707 - DNA, 21 bp, Artificial Sequence
  Description of Artificial Sequence: Synthetic oligonucleotide
  Description of Combined DNA/RNA Molecule: Synthetic oligonucleotide
uuuguaacuugaagauauutt

SEQ ID NO: 1708 - DNA, 21 bp, Artificial Sequence
  Description of Artificial Sequence: Synthetic oligonucleotide
  Description of Combined DNA/RNA Molecule: Synthetic oligonucleotide
aauaucuucaaguuacaaatt

SEQ ID NO: 1709 - DNA, 21 bp, Artificial Sequence
  Description of Artificial Sequence: Synthetic oligonucleotide
  Description of Combined DNA/RNA Molecule: Synthetic oligonucleotide
uuguaacuugaagauauuutt

SEQ ID NO: 1710 - DNA, 21 bp, Artificial Sequence
  Description of Artificial Sequence: Synthetic oligonucleotide
  Description of Combined DNA/RNA Molecule: Synthetic oligonucleotide
aaauaucuucaaguuacaatt

SEQ ID NO: 1711 - DNA, 21 bp, Artificial Sequence
  Description of Artificial Sequence: Synthetic oligonucleotide
  Description of Combined DNA/RNA Molecule: Synthetic oligonucleotide
uguaacuugaagauauuuatt

SEQ ID NO: 1712 - DNA, 21 bp, Artificial Sequence
  Description of Artificial Sequence: Synthetic oligonucleotide
  Description of Combined DNA/RNA Molecule: Synthetic oligonucleotide
uaaauaucuucaaguuacatt

SEQ ID NO: 1713 - DNA, 21 bp, Artificial Sequence
  Description of Artificial Sequence: Synthetic oligonucleotide
  Description of Combined DNA/RNA Molecule: Synthetic oligonucleotide
guaacuugaagauauuuautt

SEQ ID NO: 1714 - DNA, 21 bp, Artificial Sequence
  Description of Artificial Sequence: Synthetic oligonucleotide
  Description of Combined DNA/RNA Molecule: Synthetic oligonucleotide
auaaauaucuucaaguuactt

SEQ ID NO: 1715 - DNA, 21 bp, Artificial Sequence
  Description of Artificial Sequence: Synthetic oligonucleotide
  Description of Combined DNA/RNA Molecule: Synthetic oligonucleotide
uaacuugaagauauuuauutt

SEQ ID NO: 1716 - DNA, 21 bp, Artificial Sequence
  Description of Artificial Sequence: Synthetic oligonucleotide
  Description of Combined DNA/RNA Molecule: Synthetic oligonucleotide
aauaaauaucuucaaguuatt

SEQ ID NO: 1717 - DNA, 21 bp, Artificial Sequence
  Description of Artificial Sequence: Synthetic oligonucleotide
  Description of Combined DNA/RNA Molecule: Synthetic oligonucleotide
aacuugaagauauuuauuctt

SEQ ID NO: 1718 - DNA, 21 bp, Artificial Sequence
  Description of Artificial Sequence: Synthetic oligonucleotide
  Description of Combined DNA/RNA Molecule: Synthetic oligonucleotide
gaauaaauaucuucaaguutt

SEQ ID NO: 1719 - DNA, 21 bp, Artificial Sequence
  Description of Artificial Sequence: Synthetic oligonucleotide
  Description of Combined DNA/RNA Molecule: Synthetic oligonucleotide
acuugaagauauuuauucutt

SEQ ID NO: 1720 - DNA, 21 bp, Artificial Sequence
  Description of Artificial Sequence: Synthetic oligonucleotide
  Description of Combined DNA/RNA Molecule: Synthetic oligonucleotide
agaauaaauaucuucaagutt

SEQ ID NO: 1721 - DNA, 21 bp, Artificial Sequence
  Description of Artificial Sequence: Synthetic oligonucleotide
  Description of Combined DNA/RNA Molecule: Synthetic oligonucleotide
cuugaagauauuuauucugtt

SEQ ID NO: 1722 - DNA, 21 bp, Artificial Sequence
  Description of Artificial Sequence: Synthetic oligonucleotide
  Description of Combined DNA/RNA Molecule: Synthetic oligonucleotide
cagaauaaauaucuucaagtt

SEQ ID NO: 1723 - DNA, 21 bp, Artificial Sequence
  Description of Artificial Sequence: Synthetic oligonucleotide
  Description of Combined DNA/RNA Molecule: Synthetic oligonucleotide
uugaagauauuuauucuggtt

SEQ ID NO: 1724 - DNA, 21 bp, Artificial Sequence
  Description of Artificial Sequence: Synthetic oligonucleotide
  Description of Combined DNA/RNA Molecule: Synthetic oligonucleotide
ccagaauaaauaucuucaatt

SEQ ID NO: 1725 - DNA, 21 bp, Artificial Sequence
  Description of Artificial Sequence: Synthetic oligonucleotide
  Description of Combined DNA/RNA Molecule: Synthetic oligonucleotide
ugaagauauuuauucugggtt

SEQ ID NO: 1726 - DNA, 21 bp, Artificial Sequence
  Description of Artificial Sequence: Synthetic oligonucleotide
  Description of Combined DNA/RNA Molecule: Synthetic oligonucleotide
cccagaauaaauaucuucatt

SEQ ID NO: 1727 - DNA, 21 bp, Artificial Sequence
  Description of Artificial Sequence: Synthetic oligonucleotide
  Description of Combined DNA/RNA Molecule: Synthetic oligonucleotide
gaagauauuuauucugggutt

SEQ ID NO: 1728 - DNA, 21 bp, Artificial Sequence
  Description of Artificial Sequence: Synthetic oligonucleotide
  Description of Combined DNA/RNA Molecule: Synthetic oligonucleotide
acccagaauaaauaucuuctt

SEQ ID NO: 1729 - DNA, 21 bp, Artificial Sequence
  Description of Artificial Sequence: Synthetic oligonucleotide
  Description of Combined DNA/RNA Molecule: Synthetic oligonucleotide
gccuggaguuuauucggaatt

SEQ ID NO: 1730 - DNA, 21 bp, Artificial Sequence
  Description of Artificial Sequence: Synthetic oligonucleotide
  Description of Combined DNA/RNA Molecule: Synthetic oligonucleotide
uuccgaauaaacuccaggctt

1. A composition comprising a nucleic acid lipid particle comprising a double-stranded ribonucleic acid (dsRNA) for inhibiting the expression of a human PCSK9 gene in a cell, wherein:
the nucleic acid lipid particle comprises a lipid formulation comprising 45-65 mol % of a cationic lipid, 5 mol % to about 10 mol %, of a non-cationic lipid, 25-40 mol % of a sterol, and 0.5-5 mol % of a PEG or PEG-modified lipid,
the dsRNA consists of a sense strand and an antisense strand, and the sense strand comprises a first sequence and the antisense strand comprises a second sequence complementary to at least 15 contiguous nucleotides of a nucleotide sequence of a target sequence of a dsRNA found in Table 1a, Table 2a, Table 5a, Table 6, Table 7, Table 8,
wherein the first sequence is complementary to the second sequence and wherein the dsRNA is between 15 and 30 base pairs in length.

2. The composition of claim 1, wherein the cationic lipid comprises MC3 (((6Z,9Z,28Z,31Z)-heptatriaconta-6,9,28,31-tetraen-19-yl 4-(dimethylamino)butanoate).

3. The composition of claim 2, wherein the cationic lipid comprises MC3 and the lipid formulation is selected from the group consisting of:

| LNP11 | MC3/DSPC/Cholesterol/PEG-DMG |
|---|---|
| | 50/10/38.5/1.5 |
| LNP14 | MC3/DSPC/Cholesterol/PEG-DMG |
| | 40/15/40/5 |
| LNP15 | MC3/DSPC/Cholesterol/PEG-DSG/GalNAc-PEG-DSG |
| | 50/10/35/4.5/0.5 |
| LNP16 | MC3/DSPC/Cholesterol/PEG-DMG |
| | 50/10/38.5/1.5 |
| LNP17 | MC3/DSPC/Cholesterol/PEG-DSG |
| | 50/10/38.5/1.5 |
| LNP18 | MC3/DSPC/Cholesterol/PEG-DMG |
| | 50/10/38.5/1.5 |
| LNP19 | MC3/DSPC/Cholesterol/PEG-DMG |
| | 50/10/35/5 |
| LNP20 | MC3/DSPC/Cholesterol/PEG-DPG |
| | 50/10/38.5/1.5 |

4.-9. (canceled)

10. The composition of claim 1, wherein the sense strand comprises SEQ ID NO:1227 and the antisense strand comprises SEQ ID NO:1228.

11. (canceled)

12. (canceled)

13. The composition of claim 1, wherein the dsRNA comprises at least one modified nucleotide.

14. The composition of claim 13, wherein the modified nucleotide is chosen from the group of: a 2′-O-methyl modified nucleotide, a nucleotide comprising a 5′-phosphorothioate group, and a terminal nucleotide linked to a cholesteryl derivative or dodecanoic acid bisdecylamide group.

15. The composition of claim 13, wherein the modified nucleotide is chosen from the group of: a 2′-deoxy-2′-fluoro modified nucleotide, a 2′-deoxy-modified nucleotide, a locked nucleotide, an abasic nucleotide, 2′-amino-modified nucleotide, 2′-alkyl-modified nucleotide, morpholino nucleotide, a phosphoramidate, and a non-natural base comprising nucleotide.

16. The composition of claim 1, wherein the dsRNA comprises at least one 2′-O-methyl modified ribonucleotide and at least one nucleotide comprising a 5′-phosphorothioate group.

17. The composition of claim 1, wherein each strand of the dsRNA is 19-23 bases in length.

18. The composition of claim 1, wherein each strand of the dsRNA is 21-23 bases in length.

19. The composition of claim 1, wherein each strand of the dsRNA is 21 bases in length.

20. The composition of claim 1, further comprising a lipoprotein.

21. The composition of claim 1, further comprising apolipoprotein E (ApoE).

22. The composition of claim 21, wherein the dsRNA is conjugated to a lipophile.

23. The composition of claim 22, wherein the lipophile is cholesterol.

24. The composition of claim 21, wherein the ApoE is reconstituted with at least one amphiphilic agent.

25. The composition of claim 24, wherein the amphiphilic agent is a phospholipid.

26. The composition of claim 24, wherein the amphilic agent is a phospholipid selected from the group consisting of dimyristoyl phosphatidyl choline (DMPC), dioleoylphosphatidylethanolamine (DOPE), palmitoyloleoylphosphatidylcholine (POPC), egg phosphatidylcholine (EPC), di stearoylphosphatidylcholine (DSPC), dioleoylphosphatidylcholine (DOPC), dipalmitoylphosphatidylcholine (DPPC), dioleoylphosphatidylglycerol (DOPG), dipalmitoylphosphatidylglycerol (DPPG), -phosphatidylethanolamine (POPE), dioleoyl-phosphatidylethanolamine 4-(N-maleimidomethyl)-cyclohexane-1-carboxylate (DOPE-mal), and combinations thereof.

27. The composition of claim 25, wherein the ApoE is reconstituted high density lipoprotein (rHDL).

28.-33. (canceled)

34. A method for inhibiting the expression of PCSK9 in a cell comprising administering the composition of claim 1 to the cell.

35.-43. (canceled)
